(19) United States
(12) Patent Application Publication
(10) Pub. No.: US 2025/0236682 A1
(43) Pub. Date: Jul. 24, 2025

(54) ANTIGEN-BINDING PROTEIN COMPRISING TWO FC DOMAINS AND USE THEREOF

(71) Applicant: CENTENAIRE BIOSCIENCES, INC., Seongnam-si, Gyeonggi-do (KR)

(72) Inventors: Eun Shik CHOI, Yongin-si, Gyeonggi-do (KR); Hyunkyu PARK, Yongin-si, Gyeonggi-do (KR); Ji Seon BAE, Suwon-si, Gyeonggi-do (KR); Gi-Hyeok YANG, Seoul (KR)

(21) Appl. No.: 18/703,321

(22) PCT Filed: Oct. 22, 2022
(86) PCT No.: PCT/KR2022/015981

§ 371 Date: Apr. 19, 2024

(30) Foreign Application Priority Data
Oct. 22, 2021 (KR) 10-2021-0142135

(51) Int. Cl. C07K 16/32; A61P 35/00; C07K 16/28; C07K 16/30

(52) U.S. Cl. CPC C07K 16/32; A61P 35/00; C07K 16/2803; C07K 16/2863; C07K 16/303; C07K 2317/522; C07K 2317/524; C07K 2317/526; C07K 2317/528; C07K 2317/53; C07K 2317/565; C07K 2317/734; C07K 2317/92

(57) ABSTRACT

The present invention provides a fusion protein comprising one antigen-binding site and two Fc domains and having a novel antibody structure. Although such a novel antibody has a molecular weight similar to human IgG, the antibody structure enables Fc domains to be present on a cell surface antigen a maximum of four times compared to a natural human antibody. Thus, the fusion protein has increased affinity for Fcγ receptors, and has increased effector functions. Therefore, the fusion protein having a novel antibody format can be used as a novel antibody platform.

### TECHNICAL FIELD

[0001] The present invention relates to a novel antibody format having an antigen-binding site that specifically binds to a cancer surface antigen, and two Fc domains.

### BACKGROUND ART

[0002] Antibody-based therapeutic agents and Fc fusion proteins are a group of clinically important drugs for patients with cancer, immune diseases, infectious diseases, and inflammatory diseases. ADCC (antibody-dependent cell-mediated cytotoxicity), ADCP (antibody-dependent cellular phagocytosis), and CDC (complement-dependent cytotoxicity), which are induced by the interaction between the antibody Fc domain and the innate immune system, play an important role in alleviating or treating symptoms of the disease.

[0003] Attempts are being made to maintain the bivalency of the antibody and to improve the effector function by increasing the number of Fc domains (Claudio Sustmann et al., MAbs. 2019; Dennis R Goulet et al., Proteins, 2020). Although these platforms confirmed improvements in binding ability to Fcγ receptors and ADCC, it is difficult to obtain homogeneous antibodies due to the complexity of production and purification. Attempts to improve the effector function by connecting the Fc domains of antibodies in tandem or constituting a large number of Fc domains are also currently underway (U.S. Patent Publication US 2020/0040084 A1). In this case, there is a disadvantage that permeability to the tissue may be significantly lowered due to the increase in the size or molecular weight of the antibody.

### DETAILED DESCRIPTION OF INVENTION

### Technical Problem

[0004] Accordingly, the present inventors studied to improve the function of the antibody and at the same time to solve the problems of the existing antibody format designed to comprise multiple Fc domains in tandem as described above. As a result, the present inventors developed a novel improved antibody format that enables Fc domains to be present on a cell surface antigen a maximum of four times compared to a natural human antibody, even though it has a molecular weight (approximately 150 kDa) similar to that of natural human immunoglobulin G (IgG).

### Solution to Problem

[0005] In one aspect of the present invention, there is provided a fusion protein comprising an antigen-binding site, a first Fc domain or a variant thereof linked to a first linking position of the antigen-binding site, and a second Fc domain or a variant thereof linked to a second linking position of the antigen-binding site.

[0006] In another aspect of the present invention, there is provided a fusion protein comprising two antigen-binding sites linked in tandem (tandem two antigen-binding regions), a first Fc domain or a variant thereof linked to a first linking position of the tandem 2 antigen-binding sites, and a second Fc domain or a variant thereof linked to a second linking position of the tandem 2 antigen-binding sites. According to one embodiment, each of the two antigen-binding sites constituting the tandem 2 antigen-binding sites may be a sequence comprising a CDR sequence or a variable region that is each capable of binding to different epitopes of the same antigen or to different antigens, or a sequence consisting of a variable region.

[0007] In the fusion proteins described in the present disclosure, according to one embodiment, the antigen-binding site may be a sequence comprising a CDR sequence or a variable region of an antibody or a sequence consisting of a variable region. Therefore, the antigen-binding site may comprise a first peptide consisting of or comprising a light chain CDR sequence or a light chain variable region of an antibody, and a second peptide consisting of or comprising a heavy chain CDR sequence or a heavy chain variable region of an antibody. The first Fc domain and the second Fc domain may each be a dimer consisting of two peptide sequences. The first peptide of the antigen-binding site binds to a first Fc domain or a variant thereof, and the second peptide of the antigen-binding site binds to a second Fc domain or a variant thereof.

[0008] In the fusion proteins described in the present disclosure, according to another embodiment, the first Fc domain and the second Fc domain may be linked to each other through a covalent bond, non-covalent bond, or linker, or may not be linked to each other. In a preferred embodiment, the first Fc domain and the second Fc domain are not linked to each other.

[0009] According to embodiments of the present disclosure, the Fc domain may be an Fc domain of a wild-type immunoglobulin, and may comprise modifications for modulating the reactivity of the Fc domain to Fcγ receptors (FcγRs), ADCC or minimizing the formation of undesirable multimers of the Fc domain, for example amino acid substitutions. The Fc domain comprises CH2 and CH3 regions, and may comprise a CH4 region and/or a hinge region, and it should be interpreted that the Fc domain comprises Fc domain fragments that exhibit the function of the Fc domain.

[0010] According to embodiments of the present disclosure, an antigen-binding site and an Fc domain or a variant thereof may be joined either directly or through a linker. For example, an antigen-binding site and an Fc domain or a variant thereof may be connected with or without a linker between the N-terminus and the C-terminus, between the N-terminus and the N-terminus, or between the C-terminus and the C-terminus of each peptide molecule.

[0011] According to embodiments of the present disclosure, when an antigen-binding site and an Fc domain or a variant thereof is joined through a linker, the linker may be a commonly used pepetide linker. For example, the linker may be a peptide consisting of 1-70 amino acid residues, 2-60 amino acid residues, 2-50 amino acid residues, 2-40 amino acid residues, 2-30 amino acid residues, 3-50 amino acid residues, 3-40 amino acid residues, 3-30 amino acid residues, 2-28 amino acid residues, 2-26 amino acid residues, 2-24 amino acid residues, 2-22 amino acid residues, 2-20 amino acid residues, 2-18 amino acid residues, 2-16 amino acid residues, 2-14 amino acid residues, 2-12 amino acid residues, or 2-10 amino acid residues. The connection between a first Fc domain and an antigen-binding site, the connection between a second Fc domain and an antigen-binding site, or both may be achieved through a linker.

[0012] In another aspect of the present invention, there is provided a pharmaceutical composition for preventing or treating cancer, comprising the fusion protein as an active ingredient.

[0013] In another aspect of the present invention, there is provided nucleotides encoding the fusion protein, and a vector comprising the nucleotides, and a transformed cell into which the vector has been introduced.

[0014] In another aspect of the present invention, there is provided a method for treating or preventing cancer, comprising administering the fusion protein to a subject.

[0015] In another aspect of the present invention, there is provided a use of the fusion protein for the treatment of cancer.

### Effects of Invention

[0016] Unlike wild type antibodies, the fusion protein having the novel antibody format of the present invention comprises one or two antigen-binding sites and two Fc domains. The two Fc domains are not directly linked to each other, but the two Fc domains are each independently linked to two different polypeptide chains constituting the antigen-binding site. Even though this novel antibody format has a size and molecular weight similar to that of human IgG, it can enable Fc domains to be present on a cell surface antigen a maximum of four times compared to a natural human antibody. Due to these properties, the fusion protein having the novel antibody format has improved affinity (avidity) for Fcγ receptors and can induce improved effector functions. Therefore, the fusion protein having the novel antibody format can be utilized for various purposes by replacing conventional antibodies.

### BRIEF DESCRIPTION OF DRAWINGS

[0017] FIG. 1a is a schematic diagram of natural human immunoglobulin (IgG).

[0018] FIG. 1b is a schematic diagram of the novel engineered antibody format.

[0019] FIG. 1c is a schematic diagram showing a cancer cell with its tumor antigens bound to the antigen-specific human immunoglobulins (IgG) in a monovalent manner.

[0020] FIG. 1d is a schematic diagram showing a cancer cell with its tumor antigens bound to the antigen-specific human immunoglobulin (IgG) in a monovalent or bivalent manner.

[0021] FIG. 1e is a schematic diagram showing a cancer cell with its tumor antigens bound to the antigen-specific human immunoglobulins (IgG) in a bivalent manner.

[0022] FIG. 1f is a schematic diagram showing a cancer cell with its tumor antigens bound to the antigen-specific novel engineered antibody.

[0023] FIG. 2a is a schematic diagram of the novel monovalent antibody format (WT) with two Fc domains.

[0024] FIG. 2b is a schematic diagram of an antibody (M1) in which VH Q105C and VL A43C amino acid substitutions are introduced in the novel monovalent antibody format with two Fc domains.

[0025] FIG. 2c is a schematic diagram of an antibody (M2) in which CH1 F122C and CL S121C amino acid substitutions are introduced in the novel monovalent antibody format with two Fc domains.

[0026] FIG. 2d is a schematic diagram of an antibody (M3) in which VH G44C and VL Q100C amino acid substitutions are introduced in the novel monovalent antibody format with two Fc domains.

[0027] FIG. 3a illustrates sequence information indicating the position of Cys substitution in the VH-CH1 domain of trastuzumab. The WT sequence is SEQ ID NO: 8, the sequence of Mutant 1 is SEQ ID NO: 10, the sequence of Mutant 2 is SEQ ID NO: 12, and the sequence of Mutant 3 is SEQ ID NO: 14.

[0028] FIG. 3b illustrates sequence information indicating the position of Cys substitution in the VL-CL domain of trastuzumab. The WT sequence is SEQ ID NO: 9, the sequence of Mutant 1 is SEQ ID NO: 11, the sequence of Mutant 2 is SEQ ID NO: 13, and the sequence of Mutant 3 is SEQ ID NO: 15.

[0029] FIG. 4 illustrates a result obtained by SDS-PAGE analysis of WT, M1, M2, and M3.

[0030] FIG. 5a illustrates a result obtained by size exclusion chromatography analysis of WT.

[0031] FIG. 5b illustrates a result obtained by size exclusion chromatography analysis of M1.

[0032] FIG. 5c illustrates a result obtained by size exclusion chromatography analysis of M2.

[0033] FIG. 5d illustrates a result obtained by size exclusion chromatography analysis of M3.

[0034] FIG. 6a is a schematic diagram of an antibody (M3) in which the CL domain and the hinge region are linked with a 15-mer peptide.

[0035] FIG. 6b is a schematic diagram of an antibody (V1) in which the CL domain and the hinge region are linked with a 10-mer peptide.

[0036] FIG. 6c is a schematic diagram of an antibody (V2) in which the CL domain and the hinge region are linked with a 5-mer peptide.

[0037] FIG. 6d is a schematic diagram of an antibody (V3) in which the CL domain and the hinge region are directly linked without a linker.

[0038] FIG. 7 illustrates a result obtained by SDS-PAGE analysis of M3, V1, V2, and V3.

[0039] FIG. 8a is a schematic diagram of fragments generated when H01 and P01 are cleaved with papain.

[0040] FIG. 8b is a schematic diagram of fragments generated by papain cleavage of H01 and P01 when a disulfide bond in the hinge region is abnormally formed.

[0041] FIG. 8c illustrates a result obtained by SDS-PAGE analysis of the H01 papain cleavage product.

[0042] FIG. 8d illustrates a result obtained by SDS-PAGE analysis of the P01 papain cleavage product.

[0043] FIG. 9 illustrates a result obtained by SDS-PAGE analysis of H01 wt and H01.

[0044] FIG. 10a is a schematic diagram of H01Fv1, which has an Fv-(Fc)₂ structure.

[0045] FIG. 10b is a schematic diagram of H01Fv2, which has an Fv-(Fc)₂ structure.

[0046] FIG. 10c is a schematic diagram of H01Fv3, which has an Fv-(Fc)₂ structure.

[0047] FIG. 10d is a schematic diagram of H01Fv4, which has an Fv-(Fc)₂ structure.

[0048] FIG. 10e is a schematic diagram of H01Fv5, which has an Fv-(Fc)₂ structure.

[0049] FIG. 10f is a schematic diagram of H01Fv6, which has an Fv-(Fc)₂ structure.

[0050] FIG. 10g is a schematic diagram of H01Fv7, which has an Fv-(Fc)₂ structure.

[0051] FIG. 10h is a table showing the mutated positions of the Fv-(Fc)₂ structure.

[0052] FIG. 11 illustrates a result obtained by SDS-PAGE analysis of the Fv-(Fc)₂ structure after Protein A purification.

[0053] FIGS. 12a to 12g illustrate results obtained by SEC analysis of the Fv-(Fc)₂ structure after Protein A purification.

[0054] FIG. 13a illustrates an analysis of the sensorgram data for the binding of H01Fv1, a purified Fv-(Fc)₂ structure, to human HER2.

[0055] FIG. 13b illustrates an analysis of the sensorgram data for the binding of H01Fv2, a purified Fv-(Fc)₂ structure, to human HER2.

[0056] FIG. 13c illustrates an analysis of the sensorgram data for the binding of H01Fv4, a purified Fv-(Fc)₂ structure, to human HER2.

[0057] FIG. 13d illustrates an analysis of the sensorgram data for the binding of H01Fv5, a purified Fv-(Fc)₂ structure, to human HER2.

[0058] FIG. 13e illustrates an analysis of the sensorgram data for the binding of H01Fv6, a purified Fv-(Fc)₂ structure, to human HER2.

[0059] FIG. 13f illustrates an analysis of the sensorgram data for the binding of H01Fv7, a purified Fv-(Fc)₂ structure, to human HER2.

[0060] FIG. 14 illustrates a differential scanning fluorimetry analysis of the melting temperatures of H01, P01, trastuzumab, and pertuzumab.

[0061] FIG. 15 is a bio-layer interferometry analysis of the sensorgram data showing competitive binding of H01 and P01.

[0062] FIG. 16a is a schematic diagram showing the binding mode of H01 in combination with P01 to HER2 on HER2-positive cancer cells.

[0063] FIG. 16b is a schematic diagram showing the binding mode of trastuzumab in combination with pertuzumab to HER2 on HER2-positive cancer cells.

[0064] FIG. 17a illustrates a flow cytometry analysis of the amount of Fc domain present on the surface of NCI-N87 gastric cancer cell line upon treatment with 50 nM anti-HER2 antibody.

[0065] FIG. 17b illustrates a flow cytometry analysis of the amount of Fc domain present on the surface of BT474 breast cancer cell line upon treatment with 50 nM anti-HER2 antibody.

[0066] FIG. 17c illustrates a flow cytometry analysis of the amount of Fc domain present on the surface of SK-0V3 ovarian cancer cell line upon treatment with 50 nM anti-HER2 antibody.

[0067] FIG. 17d illustrates a flow cytometry analysis of the amount of Fc domain present on the surface of SNU-1 gastric cancer cell line upon treatment with 50 nM anti-HER2 antibody.

[0068] FIG. 17e illustrates a flow cytometry analysis of the amount of Fc domain present on the surface of SNU-5 gastric cancer cell line upon treatment with 50 nM anti-HER2 antibody.

[0069] FIG. 18a illustrates a flow cytometry analysis of the amount of Fc domain present on the surface of NCI-N87 gastric cancer cell line upon treatment with anti-HER2 antibody at indicated concentrations.

[0070] FIG. 18b illustrates a flow cytometry analysis of the amount of Fc domain present on the surface of BT474 breast cancer cell line upon treatment with anti-HER2 antibody at indicated concentrations.

[0071] FIG. 18c illustrates a flow cytometry analysis of the amount of Fc domain present on the surface of SK-0V3 ovarian cancer cell line upon treatment with anti-HER2 antibody at indicated concentrations.

[0072] FIG. 18d illustrates a flow cytometry analysis of the amount of Fc domain present on the surface of SNU-1 gastric cancer cell line upon treatment with anti-HER2 antibody at indicated concentrations.

[0073] FIG. 18e illustrates a flow cytometry analysis of the amount of Fc domain present on the surface of SNU-5 gastric cancer cell line upon treatment with anti-HER2 antibody at indicated concentrations.

[0074] FIG. 19a is a schematic diagram of H01DE4 in which S239D and 1332E mutations were introduced in H01.

[0075] FIG. 19b is a schematic diagram of P01DE4 in which S239D and 1332E mutations were introduced in P01.

[0076] FIGS. 20a to 20d are sensorgrams binding profiles of H01, H01DE4, P01, and P01DE4 for human HER2.

[0077] FIGS. 21a to 21h are sensorgrams binding profiles of H01, P01, H01DE4, P01DE4, human IgG1, trastuzumab, pertuzumab, and margetuximab for Fcγ receptor 1.

[0078] FIGS. 22a to 22h are sensorgrams binding profiles of H01, P01, H01DE4, P01DE4, human IgG1, trastuzumab, pertuzumab, and margetuximab for Fcγ receptor 2A (131R isoform).

[0079] FIGS. 23a to 23h are sensorgrams binding profiles of H01, P01, H01DE4, P01DE4, human IgG1, trastuzumab, pertuzumab, and margetuximab for Fcγ receptor 3A (176V isoform).

[0080] FIG. 24a is a graph showing an antibody concentration in blood over time when H01, P01, trastuzumab, and pertuzumab were administered intravenously at 10 mg/kg to Sprague-Dawley rats.

[0081] FIG. 24b illustrates the PK parameters calculated from FIG. 24a when H01, P01, trastuzumab, and pertuzumab were administered intravenously at 10 mg/kg to Sprague-Dawley rats.

[0082] FIG. 25 is a schematic diagram of HP501, which is a HER2 biparatopic engineered antibody.

[0083] FIG. 26 is a schematic diagram of HP501 to HP516, which are HER2 biparatopic engineered antibodies.

[0084] FIG. 27 illustrates a size exclusion chromatography analysis of HP501 to HP516, which are HER2 biparatopic engineered antibodies.

[0085] FIG. 28a is a bio-layer interferometry analysis of the sensorgram data for the binding of HP503 to HER2.

[0086] FIG. 28b is a bio-layer interferometry analysis of the sensorgram data for the binding of HP507 to HER2.

[0087] FIG. 28c is a bio-layer interferometry analysis of the sensorgram data for the binding of HP511 for HER2.

[0088] FIG. 28d is a bio-layer interferometry analysis of the sensorgram data for the binding of HP515 for HER2 protein using bio-layer interferometry analysis.

[0089] FIG. 29a is a bio-layer interferometry analysis of the sensorgram data for the binding of HP503 for Fcγ receptor 1, Fcγ receptor 2A (131R isoform), and Fcγ receptor 3A (176V isoform).

[0090] FIG. 29b is a bio-layer interferometry analysis of the sensorgram data for the binding of HP507 for Fcγ receptor 1, Fcγ receptor 2A (131R isoform), and Fcγ receptor 3A (176V isoform).

[0091] FIG. 29c is a bio-layer interferometry analysis of the sensorgram data for the binding of HP511 for Fcγ receptor 1, Fcγ receptor 2A (131R isoform), and Fcγ receptor 3A (176V isoform).

[0092] FIG. 29d is a bio-layer interferometry analysis of the sensorgram data for the binding of HP515 for Fcγ receptor 1, Fcγ receptor 2A (131R isoform), and Fcγ receptor 3A (176V isoform).

[0093] FIG. 30a is a bio-layer interferometry analysis of the sensorgram data for the binding of HP503, HP507, HP511, and HP515 for the neonatal Fc receptor (FcRn).

[0094] FIG. 30b is a bio-layer interferometry analysis of the sensorgram data for the binding of human IgG1, trastuzumab, pertuzumab, and margetuximab for the neonatal Fc receptor (FcRn).

[0095] FIG. 31a illustrates the CDC activity of anti-HER2 antibodies in the BT474 breast cancer cell line.

[0096] FIG. 31b illustrates the CDC activity of anti-HER2 antibodies in the NCI-N87 gastric cancer cell line.

[0097] FIG. 32a illustrates the ADCC activity of anti-HER2 antibodies in the NCI-N87 gastric cancer cell line.

[0098] FIG. 32b illustrates the ADCC activity of anti-HER2 antibodies in the MDA-MB-453 breast cancer cell line.

[0099] FIG. 32c illustrates the ADCC activity of anti-HER2 antibodies in the SNU-601 gastric cancer cell line.

[0100] FIG. 32d illustrates the ADCC activity of anti-HER2 antibodies in the SNU-5 gastric cancer cell line.

[0101] FIG. 33a illustrates the antitumor activity of anti-HER2 antibodies in a C.B-17 SCID mouse model of tumor xenograft of SNU-5 gastric cancer cell line.

[0102] FIG. 33b illustrates the antitumor activity of anti-HER2 antibodies in a Balb/c-nude mouse model of tumor xenograft of SNU-5 gastric cancer cell line.

[0103] FIG. 34 illustrates the antitumor activity of anti-HER2 antibodies in a mouse model of tumor xenograft of SNU-601 gastric cancer cell line.

[0104] FIG. 35 illustrates the antitumor activity of anti-HER2 antibodies in a mouse model of tumor xenograft of NCI-N87 gastric cancer cell line.

[0105] FIG. 36 illustrates a vector to express human HER2 protein in mammalian cells.

[0106] FIG. 37 illustrates the flow cytometry quantification of HER2 expression in a CT26 mouse large intestine cancer cell line clone expressing human HER2(CT26-HER2).

[0107] FIG. 38 illustrates the stability of human HER2 expression in the CT26-HER2 clones.

[0108] FIG. 39 illustrates the relative expression of human HER2 in CT26-HER2 cell line (Clone name: #2-60) compared to human cancer cell lines, and shows that H01 allows a greater amount of Fc domain to bind to the surface of CT26-HER2 cells compared to trastuzumab.

[0109] FIG. 40 illustrates antitumor activity of anti-HER2 antibodies in a syngeneic CT26-HER2 mouse tumor model.

[0110] FIG. 41a is a schematic diagram of a monovalent engineered mAb according to one embodiment.

[0111] FIG. 41b is a schematic diagram of a biparatopic engineered mAb according to one embodiment.

[0112] FIG. 42 illustrates the bio-layer interferometry analysis of the sensorgram data for the binding of a fusion protein to the target according to one embodiment. Specifically, FIG. 42a illustrates the sensorgram data for the binding of GPM01, a monovalent engineered mAb targeting GPC-3, to human GPC-3. FIG. 42b illustrates the sensorgram data for the binding of GPM02, a monovalent engineered mAb targeting GPC-3, to human GPC-3. FIG. 42c illustrates the sensorgram data for the binding of GPM04, a monovalent engineered mAb targeting GPC-3, to human GPC-3. FIG. 42d illustrates the sensorgram data for the binding of GPB01, a biparatopic engineered mAb targeting GPC-3, to human GPC-3. FIG. 42e illustrates the sensorgram data for the binding of GPB03, a biparatopic engineered mAb targeting GPC-3, to human GPC-3. FIG. 42f illustrates the sensorgram data for the binding of GPB04, a biparatopic engineered mAb targeting GPC-3, to human GPC-3. FIG. 42g illustrates the sensorgram data for the binding of GPB06, a biparatopic engineered mAb targeting GPC-3, to human GPC-3.

[0113] FIG. 43 illustrates the flow cytometry analysis of the amount of Fc domain present on the surface of HepG2 liver cancer cell line upon treatment with 100 nM GPC-3 antibody.

[0114] FIG. 44 illustrates the SDS-PAGE analysis showing the inhibition of AKT phosphorylation in the PC-3 prostate cancer cell line upon treatment with 50 nM EphA2 antibody.

[0115] FIG. 45 illustrates the flow cytometry analysis of the amount of Fc domain present on the surface of PC-3 prostate cancer cell line upon treatment with 100 nM EphA2 antibody.

[0116] FIG. 46 illustrates the bio-layer interferometry analysis of the sensorgram data for the binding of MEM01 and MEM06, which are monovalent engineered mAbs targeting MET, to human MET.

[0117] FIG. 47 illustrates the flow cytometry analysis of the amount of Fc domain present on the surface of MKN45 gastric cancer cell line upon treatment with MET antibody at indicated concentrations.

[0118] FIG. 48 illustrates the flow cytometry analysis of the amount of Fc domain present on the surface of SNU5 gastric cancer cell line upon treatment with an antibody at indicated concentrations.

[0119] FIG. 49 illustrates the bio-layer interferometry analysis of the sensorgram data for the binding of monovalent engineered mAbs targeting EGFR to human EGFR.

[0120] FIG. 50 illustrates the bio-layer interferometry analysis of the sensorgram data for the binding of 33-1, 33-2, and 33-3, which are monovalent engineered mAbs targeting CD33, and 33-4, 33-5, 33-6, and 33-7, which are biparatopic engineered mAbs targeting CD33, to human CD33.

[0121] FIG. 51 illustrates the bio-layer interferometry analysis of the sensorgram data for the binding of monovalent engineered mAbs targeting CEACAM5 to human CEACAM5.

[0122] FIG. 52 illustrates the bio-layer interferometry analysis of the sensorgram data for the binding of a fusion protein according to one embodiment for the target. Specifically, FIG. 52a illustrates the sensorgram data for the binding of T01, a monovalent engineered mAb targeting TROP2, to human TROP2. FIG. 52b illustrates the sensorgram data for the binding of MSM01, a monovalent engineered mAb targeting mesothelin, to human mesothelin. FIG. 52c illustrates the sensorgram data for the binding of LIM01, a monovalent engineered mAb targeting LIV-1, to human LIV-1. A:T01, B:MSM01, C:LIM01.

### BEST MODE FOR CARRYING OUT THE INVENTION

### Definition of Terms

[0123] As used herein, the term “fusion protein with two Fcs” or “antibody with two Fcs” refers to a fusion protein in which two Fc domains are independently joined to two polypeptide chains constituting the antigen-binding site. The two polypeptide chains constituting the antigen-binding site may be different from each other. For example, one of the two polypeptide chains constituting the antigen-binding site may be a sequence comprising or consisting of the light chain CDR sequence or light chain variable region of the antibody, or may be an scFv, and the other may be a sequence comprising or consisting of the heavy chain CDR sequence or heavy chain variable region of the antibody, or may be an scFv. In one embodiment, the fusion protein having the two Fc regions may comprise the sequence of a “humanized” form of a non-human antibody, which is a chimeric antibody comprising a human immunoglobulin comprising native CDRs. In addition, the fusion protein may comprise a “fully human antibody” or a portion of a “human antibody.” In addition, in one embodiment, the multispecific fusion protein or antigen binding domain may be a “monoclonal antibody” or a portion thereof.

[0124] As used herein, the term “antibody” refers to a substance that specifically binds to an antigen and causes an antigen-antibody reaction. In addition, the antibody is also referred to as immunoglobulin. The antibody may refer to any one selected from IgG, IgE, IgM, IgD, and IgA, and may be a subclass of IgG, such as IgG1, IgG2, IgG3, IgG4, IgA1, or IgA2. In addition, the antibody may be an agonistic antibody or an antagonistic antibody.

[0125] As used herein, the term “Fab” or “Fab region” refers to a region of an antibody that binds to an antigen. Conventional IgG generally comprises two Fab regions. Each Fab region typically consists of one variable region and one constant region of each heavy chain and light chain. Specifically, the variable region and the constant region of the heavy chain in the Fab region are the VH and CH1 regions, and the variable region and the constant region of the light chain in the Fab region are the VL and CL regions. VH, CH1, VL, and CL of the Fab region may be arranged in various ways to impart the antigen binding ability according to the present disclosure, including the CrossMab Fab technology in which VH and VL have an arrangement substituted for each other.

[0126] As used herein, the term “heavy chain” refers to a polypeptide chain of about 50 kDa to about 70 kDa. Here, the N-terminal portion comprises a variable region of at least about 120 to 130 amino acids, and the C-terminal portion comprises a constant region. The constant region may be one of five types: alpha (α), delta (δ), epsilon (ε), gamma (γ), and mu (μ). Here, α, δ, and γ comprise about 450 amino acids, and μ and ε comprise about 550 amino acids.

[0127] As used herein, the term “light chain” refers to a polypeptide chain of about 25 kDa. Here, the N-terminal portion comprises a variable region of at least about 100 to about 110 amino acids, and the C-terminal portion comprises a constant region. There are two types of light chain constant domains: kappa (κ) or lambda (λ). In addition, the constant region of the light chain is referred to as “CL”. The heavy chain C domains (CH domains) are numbered from N-terminus to C-terminus (e.g., CH1, CH2, CH3, etc.). The CL and a CH1 regions of any of these antibody classes may be used in the present disclosure. In certain embodiments, the CL and CH1 regions provided herein are of the IgG type (for example, IgG1).

[0128] As used herein, the term “Fc” or “Fc region” refers to the C-terminal region of an immunoglobulin heavy chain, including a native Fc region, a recombinant Fc region, and a variant Fc region. Therefore, Fc refers to the last two constant region immunoglobulin domains of IgA, IgD, and IgG, the last three constant region immunoglobulin domains of IgE and IgM, and the hinge present in the N-terminus of these domains. For IgA and IgM, the Fc may comprise a J chain. For IgG, the Fc comprises the immunoglobulin domains Cy2 (CH2) and Cy3 (CH3) and the hinge between Cy1 and Cy2. Although the interface of the Fc region may vary, the human IgG heavy chain Fc region is generally defined as comprising residues C226, P230, or A231 at the C-terminus, where numbering is according to the EU index. As used herein, “Fc polypeptide” or “Fc-derived polypeptide” refers to a polypeptide comprising all or part of an Fc region. In one embodiment, a variant Fc region may be in a form in which at least one amino acid, for example, about 1 to about 10 amino acids, or about 1 to about 5 amino acids, are substituted compared to the native sequence Fc region. In addition, the variant Fc region may have at least about 80% homology, at least about 90% homology, or at least about 95% homology to the native sequence Fc region.

[0129] As used herein, the term “Fv” or “Fv fragment” or “Fv region” is a polypeptide comprising the VL and VH domains of a single antibody.

[0130] As used herein, the term “single chain Fv” or “scFv” refers to an antibody fragment comprising the VH and VL domains of an antibody within a single polypeptide chain.

[0131] As used herein, the term “variable region” refers to an antibody region comprising one or more immunoglobulin domains encoded by any one of the VL (including Vkappa (VK) and Vlambda (VL)) and/or VH genes that constitute the light chain (including kappa and lambda) and heavy chain immunoglobulin loci, respectively. The light or heavy chain variable region (VL or VH) consists of a “framework” or “FR” region that includes three hypervariable regions referred to as “complementarity determining regions” or “CDRs”. As used herein, the term “antigen” refers to a structure capable of selectively binding to an antibody. A target antigen may be a polypeptide, carbohydrate, nucleic acid, lipid, hapten, or other naturally occurring compound or synthetic compound. Specifically, an antigen is a polypeptide and may be a protein present on or within a cell.

[0132] As used herein, the term “epitope” refers to an antigenic determinant and is a part on an antigen to which an antibody or polypeptide binds. A protein epitope may comprise amino acid residues that are directly involved in binding as well as amino acid residues that are effectively blocked by specific antigen-binding antibodies or peptides. It is the simplest form or smallest structural region of a complex antigen molecule that may bind to an antibody or receptor. The epitope may be linear or structural/conformational.

[0133] As used herein, the term “vector” refers to a material for transporting or expressing a nucleic acid sequence including a nucleic acid sequence encoding a multispecific fusion protein (for example, an antibody) described herein. Specifically, vectors include expression vectors, plasmids, phage vectors, viral vectors, episomes, and artificial chromosomes.

[0134] As used herein, the term “polynucleotide,” also referred to as “nucleic acid,” refers to a polymer of nucleotides of any length. Specifically, the polynucleotide may be DNA or RNA.

### Antibody Comprising Two Fcs

[0135] In one aspect of the present invention, there is provided an antibody comprising a plurality of Fc domains, characterized in that the ratio of the antigen-binding site and the Fc domain is 1:2 or 2:2. Specifically, the antibody may be a fusion protein comprising an antigen-binding site, a first Fc domain or a variant thereof, and a second Fc domain or a variant thereof.

[0136] Here, the antigen-binding site may consist of two different polypeptide chains. In addition, each polypeptide may be linked to a first Fc domain or a variant thereof, and a second Fc domain or a variant thereof.

[0137] Here, in one embodiment of the fusion protein, when the antigen-binding site comprises Fab, it may be a fusion protein in which the two Fc domains are bound to the C-terminus of the CH1 region of the heavy chain and the C-terminus of the constant region of the light chain, respectively. In addition, the Fc domain and Fab may be linked through a peptide linker.

[0138] In addition, in one embodiment of the fusion protein, when the antigen-binding site is Fv, it may be a fusion protein in which the two Fc domains are bound to the C-terminus of the variable region of the heavy chain and the C-terminus of the variable region of the light chain, respectively. In addition, the Fc domain and Fv may be linked through a peptide linker.

[0139] This novel antibody format or structure has a molecular weight similar to human IgG. In addition, the fusion protein may have an antigen binding affinity equivalent to that of a human IgG-based antibody. However, the antibody format enables Fc domains to be present on a cell surface antigen a maximum of four times compared to a natural human antibody. Due to these characteristics, the fusion protein may have increased affinity for Fcγ receptors, and may have increased effector functions compared to the wild type antibody. Each Fc domain bound to the fusion protein may have a similar level of Fc receptor (Fcγ receptor and FcRn) binding affinity as the Fc domain of an IgG-based antibody, but due to the avidity effect, the apparent binding affinity (apparent affinity) of the fusion protein to the Fc receptor (Fcγ receptor and FcRn) may be significantly increased compared to a human IgG antibody. In addition, the fusion protein has a similar level of thermal stability as that of an IgG-based antibody.

[0140] Specifically, the fusion protein may be a fusion protein comprising (a) an antigen-binding site consisting of a first polypeptide comprising at least one complementarity-determining region (CDR) sequence and a second polypeptide comprising at least one complementarity-determining region (CDR) sequence, wherein the first polypeptide and the second polypeptide form a dimer, and the antigen-binding site is capable of specifically binding to a target antigen, (b) a first Fc domain or a variant thereof that is a dimer consisting of two polypeptide sequences, one of which is joined to the first polypeptide of the antigen-binding site, and (c) a second Fc domain or a variant thereof that is a dimer consisting of two polypeptide sequences, one of which is joined to the second polypeptide of the antigen-binding site.

[0141] Here, the first polypeptide of the antigen-binding site may comprise CDR1, CDR2, and CDR3 of an antibody heavy chain, and the second polypeptide of the antigen-binding site may comprise CDR1, CDR2, and CDR3 of an antibody light chain. In addition, the first polypeptide of the antigen-binding site may further comprise a CH1 region of an antibody heavy chain, and/or the second polypeptide of the antigen-binding site may further comprise a constant region of an antibody light chain.

[0142] The specific structure of the fusion protein is described in more detail below.

### Antigen-Binding Site

[0143] Here, the antigen-binding site is capable of specifically binding to a protein expressed on the cell surface. Specifically, the antigen-binding site is capable of specifically binding to a cancer antigen.

[0144] In one embodiment, the antigen-binding site is capable of specifically binding to any one selected from the group consisting of PD-L1, EGFR, EGFRvIII, BCMA, CD22, CD25, CD30, CD33, CD37, CD38, CD52, CD56, CD123, c-Met (MET), DLL3, DR4, DR5, GD2, nectin-4, RANKL, SLAMF7, Trop-2, LIV-1, claudin 18.2, IL13α2, CD3, HER2, HER3, FGFR2, FGFR3, GPC3, ROR1, Folα, CD20, CD19, CTLA-4, VEGFR, NCAM1, ICAM-1, ICAM-2, CEACAM5, CEACAM6, carcinoembryonic antigen (CEA), CA-125, alphafetoprotein (AFP), MUC-1, MUC-16, PSMA, PSCA, epithelial tumor antigen (ETA), melanoma-associated antigen (MAGE), immature laminin receptor, TAG-72, HPV E6/E7, BING-4, calcium-activated chloride channel 2, cyclin-B1, 9D7, Ep-CAM, EphA2, EphA3, mesothelin, SAP-1, survivin, and virus-derived antigens.

[0145] A second antigen-binding site is also capable of specifically binding to any one antigen selected from the above group. According to one embodiment, the antigen to which a first antigen-binding site binds may be different from the antigen to which a second antigen-binding site binds. For example, the first antigen-binding site may comprise a sequence that specifically binds to HER2, and the second antigen-binding site may comprise a sequence that specifically binds to EGFR. In another embodiment, the first antigen-binding site may comprise a sequence that specifically binds to one epitope of an antigen, and the second antigen-binding site may comprise a sequence that specifically binds to a different epitope of the same antigen.

### Specific Examples of Antigen-Binding Sites

[0146] Here, the antigen-binding site may comprise a variable region that specifically binds to the antigen. Specifically, the variable region may include the heavy chain variable region and light chain variable region of any one antibody selected from the group consisting of cetuximab, panitumumab, necitumumab, imgatuzumab, depatuxizumab, losatuxizumab, etevritamab, AMG-595, atezolizumab, avelumab, durvalumab, trastuzumab, pertuzumab, onartuzumab, emibetuzumab, telisotuzumab, datopotamab, sacituzumab, rovalpituzumab, tarlatamab, belantamab, ladiratuzumab, codrituzumab, aprutumab, bemarituzumab, vofatamab, ramucirumab, rituximab, obinutuzumab, daratumumab, and 1C1(Clone name), but is not limited thereto.

[0147] As a specific example of the present invention, it may include an antigen-binding site that specifically binds to EGFR. For example, it may comprise a heavy chain variable region comprising H-CDR1 represented by SEQ ID NO: 175, H-CDR2 represented by SEQ ID NO: 176, and H-CDR3 represented by SEQ ID NO: 177 of cetuximab, and may comprise a light chain variable region comprising L-CDR1 represented by SEQ ID NO: 178, L-CDR2 represented by SEQ ID NO: 179, and L-CDR3 represented by SEQ ID NO: 180. As another example, it may comprise a heavy chain variable region comprising H-CDR1 represented by SEQ ID NO: 181, H-CDR2 represented by SEQ ID NO: 182, and H-CDR3 represented by SEQ ID NO: 183 of panitumumab, and may comprise a light chain variable region comprising L-CDR1 represented by SEQ ID NO: 184, L-CDR2 represented by SEQ ID NO: 185, and L-CDR3 represented by SEQ ID NO: 186. As another example, it may comprise a heavy chain variable region comprising H-CDR1 represented by SEQ ID NO: 187, H-CDR2 represented by SEQ ID NO: 188, and H-CDR3 represented by SEQ ID NO: 189 of necitumumab, and may comprise a light chain variable region comprising L-CDR1 represented by SEQ ID NO: 190, L-CDR2 represented by SEQ ID NO: 191, and L-CDR3 represented by SEQ ID NO: 192. In addition, it may comprise a heavy chain variable region comprising H-CDR1 represented by SEQ ID NO: 193, H-CDR2 represented by SEQ ID NO: 194, and H-CDR3 represented by SEQ ID NO: 195 of imgatuzumab, and may comprise a light chain variable region comprising L-CDR1 represented by SEQ ID NO: 196, L-CDR2 represented by SEQ ID NO: 197, and L-CDR3 represented by SEQ ID NO: 198. In addition, it may comprise a heavy chain variable region comprising H-CDR1 represented by SEQ ID NO: 199, H-CDR2 represented by SEQ ID NO: 200, and H-CDR3 represented by SEQ ID NO: 201 of depatuxizumab, and may comprise a light chain variable region comprising L-CDR1 represented by SEQ ID NO: 202, L-CDR2 represented by SEQ ID NO: 203, and L-CDR3 represented by SEQ ID NO: 204. In addition, it may comprise a heavy chain variable region comprising H-CDR1 represented by SEQ ID NO: 199, H-CDR2 represented by SEQ ID NO: 205, and H-CDR3 represented by SEQ ID NO: 206 of losatuxizumab, and may comprise a light chain variable region comprising L-CDR1 represented by SEQ ID NO: 202, L-CDR2 represented by SEQ ID NO: 203, and L-CDR3 represented by SEQ ID NO: 204.

[0148] As a specific example of the present invention, it may include an antigen-binding site that specifically binds to EGFRvIII. For example, it may comprise a heavy chain variable region comprising H-CDR1 represented by SEQ ID NO: 207, H-CDR2 represented by SEQ ID NO: 208, and H-CDR3 represented by SEQ ID NO: 209 of etevritamab, and may comprise a light chain variable region comprising L-CDR1 represented by SEQ ID NO: 210, L-CDR2 represented by SEQ ID NO: 211, and L-CDR3 represented by SEQ ID NO: 212. In addition, it may comprise a heavy chain variable region comprising H-CDR1 represented by SEQ ID NO: 213, H-CDR2 represented by SEQ ID NO: 214, and H-CDR3 represented by SEQ ID NO: 215 of AMG-595, and may comprise a light chain variable region comprising L-CDR1 represented by SEQ ID NO: 210, L-CDR2 represented by SEQ ID NO: 216, and L-CDR3 represented by SEQ ID NO: 217.

[0149] As a specific example of the present invention, it may include an antigen-binding site that specifically binds to PD-L1. For example, it may comprise a heavy chain variable region comprising H-CDR1 represented by SEQ ID NO: 218, H-CDR2 represented by SEQ ID NO: 219, and H-CDR3 represented by SEQ ID NO: 220 of atezolizumab, and may comprise a light chain variable region comprising L-CDR1 represented by SEQ ID NO: 221, L-CDR2 represented by SEQ ID NO: 222, and L-CDR3 represented by SEQ ID NO: 223. In addition, it may comprise a heavy chain variable region comprising H-CDR1 represented by SEQ ID NO: 224, H-CDR2 represented by SEQ ID NO: 225, and H-CDR3 represented by SEQ ID NO: 226 of avelumab, and may comprise a light chain variable region comprising L-CDR1 represented by SEQ ID NO: 227, L-CDR2 represented by SEQ ID NO: 228, and L-CDR3 represented by SEQ ID NO: 229. In addition, it may comprise a heavy chain variable region comprising H-CDR1 represented by SEQ ID NO: 230, H-CDR2 represented by SEQ ID NO: 231, and H-CDR3 represented by SEQ ID NO: 232 of durvalumab, and may comprise a light chain variable region comprising L-CDR1 represented by SEQ ID NO: 233, L-CDR2 represented by SEQ ID NO: 234, and L-CDR3 represented by SEQ ID NO: 235.

[0150] As a specific example of the present invention, it may include an antigen-binding site that specifically binds to HER2. For example, it may comprise a heavy chain variable region comprising H-CDR1 represented by SEQ ID NO: 21, H-CDR2 represented by SEQ ID NO: 22, and H-CDR3 represented by SEQ ID NO: 23 of trastuzumab, and may comprise a light chain variable region comprising L-CDR1 represented by SEQ ID NO: 24, L-CDR2 represented by SEQ ID NO: 25, and L-CDR3 represented by SEQ ID NO: 26. In addition, it may comprise a heavy chain variable region comprising H-CDR1 represented by SEQ ID NO: 33, H-CDR2 represented by SEQ ID NO: 34, and H-CDR3 represented by SEQ ID NO: 35 of pertuzumab, and may comprise a light chain variable region comprising L-CDR1 represented by SEQ ID NO: 36, L-CDR2 represented by SEQ ID NO: 37, and L-CDR3 represented by SEQ ID NO: 38.

[0151] As a specific example of the present invention, it may include an antigen-binding site that specifically binds to c-Met. For example, it may comprise a heavy chain variable region comprising H-CDR1 represented by SEQ ID NO: 236, H-CDR2 represented by SEQ ID NO: 237, and H-CDR3 represented by SEQ ID NO: 238 of onartuzumab, and may comprise a light chain variable region comprising L-CDR1 represented by SEQ ID NO: 239, L-CDR2 represented by SEQ ID NO: 240, and L-CDR3 represented by SEQ ID NO: 241. In addition, it may comprise a heavy chain variable region comprising H-CDR1 represented by SEQ ID NO: 242, H-CDR2 represented by SEQ ID NO: 243, and H-CDR3 represented by SEQ ID NO: 244 of emibetuzumab, and may comprise a light chain variable region comprising L-CDR1 represented by SEQ ID NO: 245, L-CDR2 represented by SEQ ID NO: 246, and L-CDR3 represented by SEQ ID NO: 247. In addition, it may comprise a heavy chain variable region comprising H-CDR1 represented by SEQ ID NO: 248, H-CDR2 represented by SEQ ID NO: 249, and H-CDR3 represented by SEQ ID NO: 250 of telisotuzumab, and may comprise a light chain variable region comprising L-CDR1 represented by SEQ ID NO: 251, L-CDR2 represented by SEQ ID NO: 252, and L-CDR3 represented by SEQ ID NO: 253.

[0152] As a specific example of the present invention, it may include an antigen-binding site that specifically binds to Trop-2. For example, it may comprise a heavy chain variable region comprising H-CDR1 represented by SEQ ID NO: 254, H-CDR2 represented by SEQ ID NO: 255, and H-CDR3 represented by SEQ ID NO: 256 of datopotamab, and may comprise a light chain variable region comprising L-CDR1 represented by SEQ ID NO: 257, L-CDR2 represented by SEQ ID NO: 258, and L-CDR3 represented by SEQ ID NO: 259. In addition, it may comprise a heavy chain variable region comprising H-CDR1 represented by SEQ ID NO: 260, H-CDR2 represented by SEQ ID NO: 261, and H-CDR3 represented by SEQ ID NO: 262 of sacituzumab, and may comprise a light chain variable region comprising L-CDR1 represented by SEQ ID NO: 263, L-CDR2 represented by SEQ ID NO: 264, and L-CDR3 represented by SEQ ID NO: 265.

[0153] As a specific example of the present invention, it may include an antigen-binding site that specifically binds to DLL3. For example, it may comprise a heavy chain variable region comprising H-CDR1 represented by SEQ ID NO: 266, H-CDR2 represented by SEQ ID NO: 267, and H-CDR3 represented by SEQ ID NO: 268 of rovalpituzumab, and may comprise a light chain variable region comprising L-CDR1 represented by SEQ ID NO: 269, L-CDR2 represented by SEQ ID NO: 270, and L-CDR3 represented by SEQ ID NO: 271. In addition, it may comprise a heavy chain variable region comprising H-CDR1 represented by SEQ ID NO: 272, H-CDR2 represented by SEQ ID NO: 273, and H-CDR3 represented by SEQ ID NO: 274 of tarlatamab, and may comprise a light chain variable region comprising L-CDR1 represented by SEQ ID NO: 275, L-CDR2 represented by SEQ ID NO: 276, and L-CDR3 represented by SEQ ID NO: 277.

[0154] As a specific example of the present invention, it may include an antigen-binding site that specifically binds to BCMA. For example, it may comprise a heavy chain variable region comprising H-CDR1 represented by SEQ ID NO: 278, H-CDR2 represented by SEQ ID NO: 279, and H-CDR3 represented by SEQ ID NO: 280 of belantamab, and may comprise a light chain variable region comprising L-CDR1 represented by SEQ ID NO: 281, L-CDR2 represented by SEQ ID NO: 282, and L-CDR3 represented by SEQ ID NO: 283.

[0155] As a specific example of the present invention, it may include an antigen-binding site that specifically binds to LIV-1. For example, it may comprise a heavy chain variable region comprising H-CDR1 represented by SEQ ID NO: 284, H-CDR2 represented by SEQ ID NO: 285, and H-CDR3 represented by SEQ ID NO: 286 of ladiratuzumab, and may comprise a light chain variable region comprising L-CDR1 represented by SEQ ID NO: 287, L-CDR2 represented by SEQ ID NO: 288, and L-CDR3 represented by SEQ ID NO: 289.

[0156] As a specific example of the present invention, it may include an antigen-binding site that specifically binds to GPC-3. For example, it may comprise a heavy chain variable region comprising H-CDR1 represented by SEQ ID NO: 99, H-CDR2 represented by SEQ ID NO: 100, and H-CDR3 represented by SEQ ID NO: 101 of codrituzumab, and may comprise a light chain variable region comprising L-CDR1 represented by SEQ ID NO: 102, L-CDR2 represented by SEQ ID NO: 103, and L-CDR3 represented by SEQ ID NO: 104.

[0157] As a specific example of the present invention, it may include an antigen-binding site that specifically binds to FGFR2. For example, it may comprise a heavy chain variable region comprising H-CDR1 represented by SEQ ID NO: 290, H-CDR2 represented by SEQ ID NO: 291, and H-CDR3 represented by SEQ ID NO: 292 of aprutumab, and may comprise a light chain variable region comprising L-CDR1 represented by SEQ ID NO: 293, L-CDR2 represented by SEQ ID NO: 294, and L-CDR3 represented by SEQ ID NO: 295. In addition, it may comprise a heavy chain variable region comprising H-CDR1 represented by SEQ ID NO: 296, H-CDR2 represented by SEQ ID NO: 297, and H-CDR3 represented by SEQ ID NO: 298 of bemarituzumab, and may comprise a light chain variable region comprising L-CDR1 represented by SEQ ID NO: 299, L-CDR2 represented by SEQ ID NO: 300, and L-CDR3 represented by SEQ ID NO: 301.

[0158] As a specific example of the present invention, it may include an antigen-binding site that specifically binds to FGFR3. For example, it may comprise a heavy chain variable region comprising H-CDR1 represented by SEQ ID NO: 302, H-CDR2 represented by SEQ ID NO: 303, and H-CDR3 represented by SEQ ID NO: 304 of vofatamab, and may comprise a light chain variable region comprising L-CDR1 represented by SEQ ID NO: 305, L-CDR2 represented by SEQ ID NO: 306, and L-CDR3 represented by SEQ ID NO: 307.

[0159] As a specific example of the present invention, it may include an antigen-binding site that specifically binds to VEGFR2. For example, it may comprise a heavy chain variable region comprising H-CDR1 represented by SEQ ID NO: 308, H-CDR2 represented by SEQ ID NO: 309, and H-CDR3 represented by SEQ ID NO: 310 of ramucirumab, and may comprise a light chain variable region comprising L-CDR1 represented by SEQ ID NO: 311, L-CDR2 represented by SEQ ID NO: 312, and L-CDR3 represented by SEQ ID NO: 313.

[0160] As a specific example of the present invention, it may include an antigen-binding site that specifically binds to CD20. For example, it may comprise a heavy chain variable region comprising H-CDR1 represented by SEQ ID NO: 314, H-CDR2 represented by SEQ ID NO: 315, and H-CDR3 represented by SEQ ID NO: 316 of rituximab, and may comprise a light chain variable region comprising L-CDR1 represented by SEQ ID NO: 317, L-CDR2 represented by SEQ ID NO: 318, and L-CDR3 represented by SEQ ID NO: 319. For example, it may comprise a heavy chain variable region comprising H-CDR1 represented by SEQ ID NO: 320, H-CDR2 represented by SEQ ID NO: 321, and H-CDR3 represented by SEQ ID NO: 322 of obinutuzumab, and may comprise a light chain variable region comprising L-CDR1 represented by SEQ ID NO: 323, L-CDR2 represented by SEQ ID NO: 324, and L-CDR3 represented by SEQ ID NO: 325.

[0161] As a specific example of the present invention, it may include an antigen-binding site that specifically binds to CD38. For example, it may comprise a heavy chain variable region comprising H-CDR1 represented by SEQ ID NO: 326, H-CDR2 represented by SEQ ID NO: 327, and H-CDR3 represented by SEQ ID NO: 328 of daratumumab, and may comprise a light chain variable region comprising L-CDR1 represented by SEQ ID NO: 329, L-CDR2 represented by SEQ ID NO: 330, and L-CDR3 represented by SEQ ID NO: 331.

[0162] As a specific example of the present invention, it may include an antigen-binding site that specifically binds to EphA2. For example, it may comprise a heavy chain variable region comprising H-CDR1 represented by SEQ ID NO: 157, H-CDR2 represented by SEQ ID NO: 158, and H-CDR3 represented by SEQ ID NO: 159 of 1C1, and may comprise a light chain variable region comprising L-CDR1 represented by SEQ ID NO: 160, L-CDR2 represented by SEQ ID NO: 161, and L-CDR3 represented by SEQ ID NO: 162.

[0163] Table 1 below shows the CDR sequences of non-limiting exemplary antibodies with anticancer efficacy that may be used in specific examples of the present invention.

TABLE 1

| | Heavy chain | | | Light chain | | |
|---|---|---|---|---|---|---|
| Antibody | CDR | Sequence | SEQ ID NO | CDR | Sequence | SEQ ID NO |
| Cetuximab | VH-CDR1 | NYGVH | 175 | VL-CDR1 | RASQSIGTNIH | 178 |
| | VH-CDR2 | VIWSGGNTDYNTPF | 176 | VL-CDR2 | YASESIS | 179 |
| | | TS | | | | |
| | VH-CDR3 | ALTYYDYEFAY | 177 | VL-CDR3 | QQNNNWPTT | 180 |
| Panitumumab | VH-CDR1 | DYYWT | 181 | VL-CDR1 | QASQDISNYLN | 184 |
| | VH-CDR2 | HIYYSGNTNYNPSL | 182 | VL-CDR2 | DASNLET | 185 |
| | | KS | | | | |
| | VH-CDR3 | DRVTGAFDI | 183 | VL-CDR3 | QHFDHLPLA | 186 |
| Necitumumab | VH-CDR1 | DYYWS | 187 | VL-CDR1 | RASQSVSSYLA | 190 |
| | VH-CDR2 | YIYYSGSTDYNPSL | 188 | VL-CDR2 | DASNRAT | 191 |
| | | KS | | | | |
| | VH-CDR3 | VSIFGVGTFDY | 189 | VL-CDR3 | HQYGSTPLT | 192 |
| Imgatuzumab | VH-CDR1 | DYKIH | 193 | VL-CDR1 | RASQGINNYLN | 196 |
| | VH-CDR2 | YFNPNSGYSTYAQK | 194 | VL-CDR2 | NTNNLQT | 197 |
| | | FQG | | | | |
| | VH-CDR3 | LSPGGYYVMDA | 195 | VL-CDR3 | LQHNSFPT | 198 |
| Depatuxizumab | VH-CDR1 | DFAWN | 199 | VL-CDR1 | HSSQDINSNIG | 202 |
| | VH-CDR2 | YISYSGNTRYQPSL | 200 | VL-CDR2 | HGTNLDD | 203 |
| | | KS | | | | |
| | VH-CDR3 | AGRGFPY | 201 | VL-CDR3 | VQYAQFPWT | 204 |
| Losatuxizumab | VH-CDR1 | DFAWN | 199 | VL-CDR1 | HSSQDINSNIG | 202 |
| | VH-CDR2 | YISYNGNTRYQPSL | 205 | VL-CDR2 | HGTNLDD | 203 |
| | | KS | | | | |
| | VH-CDR3 | ASRGFPY | 206 | VL-CDR3 | VQYAQFPWT | 204 |
| Etevritamab | VH-CDR1 | NYGMH | 207 | VL-CDR1 | RSSQSLVHSDG | 210 |
| | | | | | NTYLS | |
| | VH-CDR2 | VIWYDGSDKYYAD | 208 | VL-CDR2 | RISRRFS | 211 |
| | | SVRG | | | | |
| | VH-CDR3 | DGYDILTGNPRDFD | 209 | VL-CDR3 | MQSTHVPRT | 212 |
| | | Y | | | | |
| AMG-595 | VH-CDR1 | SYGMH | 213 | VL-CDR1 | RSSQSL VHSDG | 210 |
| | | | | | NTYLS | |
| | VH-CDR2 | VIWYDGSNKYYVD | 214 | VL-CDR2 | KISNRFS | 216 |
| | | SVKG | | | | |
| | VH-CDR3 | DGWQQLAPFDY | 215 | VL-CDR3 | MQATQLPRT | 217 |
| Atezolizumab | VH-CDR1 | DSWIH | 218 | VL-CDR1 | RASQDVSTAVA | 221 |
| | VH-CDR2 | WISPYGGSTYYADS | 219 | VL-CDR2 | SASFLYS | 222 |
| | | VKG | | | | |
| | VH-CDR3 | RHWPGGFDY | 220 | VL-CDR3 | QQYLYHPAT | 223 |
| Avelumab | VH-CDR1 | SSYIM | 224 | VL-CDR1 | TGTSSDVGGYN | 227 |
| | | | | | YVS | |
| | VH-CDR2 | SIYPSGGITFYADTV | 225 | VL-CDR2 | DVSNRPS | 228 |
| | | KG | | | | |
| | VH-CDR3 | IKLGTVTTVDY | 226 | VL-CDR3 | SSYTSSSTRV | 229 |
| Durvalumab | VH-CDR1 | RYWMS | 230 | VL-CDR1 | RASQRVSSSYL | 233 |
| | | | | | A | |
| | VH-CDR2 | NIKQDGSEKYYVDS | 231 | VL-CDR2 | DASSRAT | 234 |
| | | VKG | | | | |
| | VH-CDR3 | EGGWFGELAFDY | 232 | VL-CDR3 | QQYGSLPWT | 235 |
| Trastuzumab | VH-CDR1 | DTYIH | 21 | VL-CDR1 | RASQDVNTAV | 24 |
| | | | | | A | |
| | VH-CDR2 | RIYPTNGYTRYADS | 22 | VL-CDR2 | SASFLYS | 25 |
| | | VKG | | | | |
| | VH-CDR3 | WGGDGFYAMDY | 23 | VL-CDR3 | QQHYTTPPT | 26 |
| Pertuzumab | VH-CDR1 | DYTMD | 33 | VL-CDR1 | KASQDVSIGVA | 36 |
| | VH-CDR2 | DVNPNSGGSIYNQR | 34 | VL-CDR2 | SASYRYT | 37 |
| | | FKG | | | | |
| | VH-CDR3 | NLGPSFYFDYW | 35 | VL-CDR3 | QQYYIYPYT | 38 |
| Onartuzumab | VH-CDR1 | SYWLH | 236 | VL-CDR1 | KSSQSLLYTSS | 239 |
| | | | | | QKNYLA | |
| | VH-CDR2 | MIDPSNSDTRFNPN | 237 | VL-CDR2 | WASTRES | 240 |
| | | FKD | | | | |
| | VH-CDR3 | YRSYVTPLDY | 238 | VL-CDR3 | QQYYAYPWT | 241 |
| Emibetuzumab | VH-CDR1 | DYYMH | 242 | VL-CDR1 | SVSSSVSSIYLH | 245 |
| | VH-CDR2 | RVNPNRRGTTYNQ | 243 | VL-CDR2 | STSNLAS | 246 |
| | | KFEG | | | | |
| | VH-CDR3 | ANWLDY | 244 | VL-CDR3 | QVYSGYPLT | 247 |
| Telisotuzumab | VH-CDR1 | AYTMH | 248 | VL-CDR1 | KSSESVDSYAN | 251 |
| | | | | | SFLH | |
| | VH-CDR2 | WIKPNNGLANYAQ | 249 | VL-CDR2 | RASTRES | 252 |
| | | KFQG | | | | |
| | VH-CDR3 | SEITTEFDY | 250 | VL-CDR3 | QQSKEDPLT | 253 |
| Datopotamab | VH-CDR1 | TAGMQ | 254 | VL-CDR1 | KASQDVSTAV | 257 |
| | | | | | A | |
| | VH-CDR2 | WINTHSGVPKYAE | 255 | VL-CDR2 | SASYRYT | 258 |
| | | DFKG | | | | |
| | VH-CDR3 | SGFGSSYWYFDV | 256 | VL-CDR3 | QQHYITPLT | 259 |
| Sacituzumab | VH-CDR1 | NYGMN | 260 | VL-CDR1 | KASQDVSIAVA | 263 |
| | VH-CDR2 | WINTYTGEPTYTDD | 261 | VL-CDR2 | SASYRYT | 264 |
| | | FKG | | | | |
| | VH-CDR3 | GGFGSSYWYFDV | 262 | VL-CDR3 | QQHYITPLT | 265 |
| Rovalpituzumab | VH-CDR1 | NYGMN | 266 | VL-CDR1 | KASQSVSNDVV | 269 |
| | VH-CDR2 | WINTYTGEPTYADD | 267 | VL-CDR2 | YASNRYT | 270 |
| | | FKG | | | | |
| | VH-CDR3 | IGDSSPSDY | 268 | VL-CDR3 | QQDYTSPWT | 271 |
| Tarlatamab | VH-CDR1 | SYYWS | 272 | VL-CDR1 | RASQRVNNNY | 275 |
| | | | | | LA | |
| | VH-CDR2 | YVYYSGTTNYNPSL | 273 | VL-CDR2 | GASSRAT | 276 |
| | | KS | | | | |
| | VH-CDR3 | IAVTGFYFDY | 274 | VL-CDR3 | QQYDRSPLT | 277 |
| Belantamab | VH-CDR1 | NYWMH | 278 | VL-CDR1 | SASQDISNYLN | 281 |
| | VH-CDR2 | ATYRGHSDTYYNQ | 279 | VL-CDR2 | YTSNLHS | 282 |
| | | KFKG | | | | |
| | VH-CDR3 | GAIYDGYDVLDN | 280 | VL-CDR3 | QQYRKLPWT | 283 |
| Ladiratuzumab | VH-CDR1 | DYYMH | 284 | VL-CDR1 | RSSQSLLHSSG | 287 |
| | | | | | NTYLE | |
| | VH-CDR2 | WIDPENGDTEYGPK | 285 | VL-CDR2 | KISTRFS | 288 |
| | | FQG | | | | |
| | VH-CDR3 | HNAHYGTWFAY | 286 | VL-CDR3 | FQGSHVPYT | 289 |
| Codrituzumab | VH-CDR1 | DYEMH | 99 | VL-CDR1 | RSSQSLVHSNR | 102 |
| | | | | | NTYLH | |
| | VH-CDR2 | ALDPKTGDTAYSQ | 100 | VL-CDR2 | KVSNRFS | 103 |
| | | KFKG | | | | |
| | VH-CDR3 | FYSYTY | 101 | VL-CDR3 | SQNTHVPPT | 104 |
| Aprutumab | VH-CDR1 | SYAMS | 290 | VL-CDR1 | SGSSSNIGNNY | 293 |
| | | | | | VS | |
| | VH-CDR2 | AISGSGTSTYYADS | 291 | VL-CDR2 | ENYNRPA | 294 |
| | | VKG | | | | |
| | VH-CDR3 | VRYNWNHGDWFD | 292 | VL-CDR3 | SSWDDSLNYW | 295 |
| | | P | | | V | |
| Bemarituzumab | VH-CDR1 | TYNVH | 296 | VL-CDR1 | KASQGVSNDV | 299 |
| | | | | | A | |
| | VH-CDR2 | SIYPDNGDTSYNQN | 297 | VL-CDR2 | SASYRYT | 300 |
| | | FKG | | | | |
| | VH-CDR3 | GDFAY | 298 | VL-CDR3 | QQHSTTPYT | 301 |
| Vofatamab | VH-CDR1 | STGIS | 302 | VL-CDR1 | RASQDVDTSLA | 305 |
| | VH-CDR2 | RIYPTSGSTNYADS | 303 | VL-CDR2 | SASFLYS | 306 |
| | | VKG | | | | |
| | VH-CDR3 | TYGIYDLYVDYTEY | 304 | VL-CDR3 | QQSTGHPQT | 307 |
| | | VMDY | | | | |
| Ramucirumab | VH-CDR1 | SYSMN | 308 | VL-CDR1 | RASQGIDNWLG | 311 |
| | VH-CDR2 | SISSSSSYIYYADSV | 309 | VL-CDR2 | DASNLDT | 312 |
| | | KG | | | | |
| | VH-CDR3 | VTDAFDI | 310 | VL-CDR3 | QQAKAFPPT | 313 |
| Rituximab | VH-CDR1 | SYNMH | 314 | VL-CDR1 | RSSKSLLHSNGI | 317 |
| | | | | | TYLY | |
| | VH-CDR2 | AIYPGNGDTSYNQK | 315 | VL-CDR2 | QMSNLVS | 318 |
| | | FKG | | | | |
| | VH-CDR3 | STYYGGDWYFNV | 316 | VL-CDR3 | AQNLELPYT | 319 |
| Obinutuzumab | VH-CDR1 | YSWIN | 320 | VL-CDR1 | RASQSVSSYLA | 323 |
| | VH-CDR2 | RIFPGDGDTDYNGK | 321 | VL-CDR2 | DASNRAT | 324 |
| | | FKG | | | | |
| | VH-CDR3 | NVFDGYWLVY | 322 | VL-CDR3 | QQRSNWPPT | 325 |
| Daratumumab | VH-CDR1 | SFAMS | 326 | VL-CDR1 | RASQSVSSYLA | 329 |
| | VH-CDR2 | AISGSGGGTYYADS | 327 | VL-CDR2 | DASNRAT | 330 |
| | | VKG | | | | |
| | VH-CDR3 | DKILWFGEPVFDY | 328 | VL-CDR3 | QQRSNWPPT | 331 |
| 1C1 | VH-CDR1 | HYMMA | 157 | VL-CDR1 | RASQSISTWLA | 160 |
| (Clone name) | VH-CDR2 | RIGPSGGPTHYADS | 158 | VL-CDR2 | KASNLHT | 161 |
| | | VKG | | | | |
| | VH-CDR3 | YDSGYDYVAVAGP | 159 | VL-CDR3 | QQYNSYSRT | 162 |
| | | AEYFQH | | | | |

### Antigen

[0164] As antigens to which the antigen-binding site described herein may specifically bind, the following non-limiting substances may be exemplified.

[0165] “Epidermal growth factor receptor (EGFR)”: It is a cell membrane receptor that regulates cell growth, division, survival, and death. In various cancers, the expression of EGFR is increased in tumor tissues. It is known that tumor tissues with the increased EGFR are invasive, metastatic, and highly resistant to anticancer agents. In one embodiment, the substance that inhibits EGFR may be cetuximab, panitumumab, necitumumab, imgatuzumab, depatuxizumab, or losatuxizumab, but is not limited thereto.

[0166] “Epidermal growth factor receptor variant 3 (EGFRvIII)”: It is a mutation in which exons 2 to 7 of EGFR are deleted. It is mainly reported in glioblastoma multiforme, and most patients with EGFRvIII-positive mutation have a poor prognosis. In one embodiment, the substance that inhibits EGFRvIII may be cetuximab, panitumumab, necitumumab, imgatuzumab, depatuxizumab, losatuxizumab, etevritamab, or AMG-595, but is not limited thereto.

[0167] Programmed death-ligand 1 (PD-L1)”: It is a protein overexpressed on the surface of cancer cells. It is a major cancer-specific antigen that plays an important role in inducing exhaustion and apoptosis of T cells and acquiring immune tolerance in cancer cells. In one embodiment, PD-L1 targeting anticancer antibody may be atezolizumab, avelumab, and durvalumab, but is not limited thereto.

[0168] “HER-2/neu (human epidermal growth factor receptor 2): It regulates cell proliferation through activation of PI3K/AkT. It is known that it is overexpressed in metastatic breast cancer and ovarian cancer, etc., and induces resistance against anticancer agents. The HER2/neu targeting anticancer agent may be trastuzumab or pertuzumab, but is not limited thereto.

[0169] “c-Met (mesenchymal-epithelial transition factor)”: It is a hepatocyte growth factor receptor. Its amplification or mutation is frequently reported in cancer cells, and it is known to promote tumor growth, metastasis, and malignancy. Specifically, the inhibitor of the protein may be onartuzumab, emibetuzumab, or telisotuzumab, but is not limited thereto.

[0170] “Trop-2 (tumor-associated calcium signal transducer 2)”: It is a cellular glycoprotein related to cancer cell growth and proliferation. It is known to be specifically overexpressed in non-small cell lung cancer and breast cancer. Specifically, the antibody targeting the protein may be datopotamab or sacituzumab, but is not limited thereto.

[0171] “DLL3 (delta-like ligand 3)”: It is a major cancer target antigen known to be expressed in approximately 85% of small cell lung cancer patients. Specifically, the antibody targeting the protein may be rovalpituzumab or tarlatamab, but is not limited thereto.

[0172] “BCMA (B-cell maturation antigen)”: It is an important factor in the survival and proliferation of myeloma cells and is a clinically proven target for treatment of multiple myeloma. Specifically, the antibody targeting the protein may be belantamab, but is not limited thereto.

[0173] “LIV-1 (zinc transporter ZIP6)”: It is a highly cancer-specific antigen overexpressed in breast cancer. Specifically, the antibody targeting the protein may be ladiratuzumab, but is not limited thereto.

[0174] “GPC-3 (glypican-3)”: It is a highly cancer-specific antigen that is specifically overexpressed in liver cancer. Specifically, the antibody targeting the protein may be codrituzumab, but is not limited thereto.

[0175] “FGFR (fibroblast growth factor receptor)”: It is a receptor for fibroblast growth factor (FGF), which regulates various biological processes including cell growth, differentiation, and migration. The FGFR gene is easily mutated, and these variants are commonly observed in breast cancer, uterine cancer, ovarian cancer, cervical cancer, and the like. The four FGFR genes are made of seven signaling receptors, of which FGFR2 and FGFR3 are highly cancer-specific antigens. The antibody targeting FGFR2 or FGFR3 may be aprutumab, bemarituzumab, or vofatamab, but is not limited thereto.

[0176] “Vascular endothelial growth factor receptor (VEGFR)”: It is a cell membrane receptor for a vascular endothelial growth factor that induces angiogenesis. The VEGFR inhibitor inhibits tumor growth and metastasis by inhibiting angiogenesis. In one embodiment, the VEGFR inhibitor may be ramucirumab, but is not limited thereto.

[0177] “CD20 (B lymphocyte antigen CD20)”: It is a protein expressed on the surface of B cells, which is used as a target protein for the treatment of B cell lymphoma. The CD20 inhibitor may be rituximab or obinutuzumab, but is not limited thereto.

[0178] “CD38 (cluster of differentiation 38)”: It is a protein that acts as a signal transduction receptor in immune cells and regulates cell proliferation and death. The inhibitor targeting the protein may be daratumumab, but is not limited thereto.

[0179] “EphA2 (EPH receptor A2)”: It is overexpressed in cancer cells and has a significant impact on the growth and metastasis of cancer cells. The antibody targeting the protein may be 1C1, but is not limited thereto.

[0180] The antigen-binding site that specifically binds to the antigens exemplified above may include CDR sequences as exemplified below.

### EGFR:

[0181] 1) VH region (SEQ ID NO: 334) comprising the amino acid sequences of SEQ ID NO: 175 (VH-CDR1), SEQ ID NO: 176 (VH-CDR2) and SEQ ID NO: 177 (VH-CDR3), and VL region (SEQ ID NO: 335) comprising the amino acid sequences of SEQ ID NO: 178 (VL-CDR1), SEQ ID NO: 179 (VL-CDR2) and SEQ ID NO: 180 (VL-CDR3);
[0182] 2) VH region (SEQ ID NO: 336) comprising the amino acid sequences of SEQ ID NO: 181 (VH-CDR1), SEQ ID NO: 182 (VH-CDR2) and SEQ ID NO: 183 (VH-CDR3), and VL region (SEQ ID NO: 337) comprising the amino acid sequences of SEQ ID NO: 184 (VL-CDR1), SEQ ID NO: 185 (VL-CDR2) and SEQ ID NO: 186 (VL-CDR3);
[0183] 3) VH region (SEQ ID NO: 338) comprising the amino acid sequences of SEQ ID NO: 187 (VH-CDR1), SEQ ID NO: 188 (VH-CDR2) and SEQ ID NO: 189 (VH-CDR3), and VL region (SEQ ID NO: 339) comprising the amino acid sequences of SEQ ID NO: 190 (VL-CDR1), SEQ ID NO: 191 (VL-CDR2) and SEQ ID NO: 192 (VL-CDR3);
[0184] 4) VH region (SEQ ID NO: 340) comprising the amino acid sequences of SEQ ID NO: 193 (VH-CDR1), SEQ ID NO: 194 (VH-CDR2) and SEQ ID NO: 195 (VH-CDR3), and VL region (SEQ ID NO: 341) comprising the amino acid sequences of SEQ ID NO: 196 (VL-CDR1), SEQ ID NO: 197 (VL-CDR2) and SEQ ID NO: 198 (VL-CDR3);
[0185] 5) VH region (SEQ ID NO: 342) comprising the amino acid sequences of SEQ ID NO: 199 (VH-CDR1), SEQ ID NO: 200 (VH-CDR2) and SEQ ID NO: 201 (VH-CDR3), and VL region (SEQ ID NO: 343) comprising the amino acid sequences of SEQ ID NO: 202 (VL-CDR1), SEQ ID NO: 203 (VL-CDR2) and SEQ ID NO: 204 (VL-CDR3);
[0186] 6) VH region (SEQ ID NO: 344) comprising the amino acid sequences of SEQ ID NO: 199 (VH-CDR1), SEQ ID NO: 205 (VH-CDR2) and SEQ ID NO: 206 (VH-CDR3), and VL region (SEQ ID NO: 345) comprising the amino acid sequences of SEQ ID NO: 202 (VL-CDR1), SEQ ID NO: 203 (VL-CDR2) and SEQ ID NO: 204 (VL-CDR3);

### EGFRvIII:

[0187] 7) VH region (SEQ ID NO: 346) comprising the amino acid sequences of SEQ ID NO: 207 (VH-CDR1), SEQ ID NO: 208 (VH-CDR2) and SEQ ID NO: 209 (VH-CDR3), and VL region (SEQ ID NO: 347) comprising the amino acid sequences of SEQ ID NO: 210 (VL-CDR1), SEQ ID NO: 211 (VL-CDR2) and SEQ ID NO: 212 (VL-CDR3);
[0188] 8) VH region (SEQ ID NO: 348) comprising the amino acid sequences of SEQ ID NO: 213 (VH-CDR1), SEQ ID NO: 214 (VH-CDR2) and SEQ ID NO: 215 (VH-CDR3), and VL region (SEQ ID NO: 349) comprising the amino acid sequences of SEQ ID NO: 210 (VL-CDR1), SEQ ID NO: 216 (VL-CDR2) and SEQ ID NO: 217 (VL-CDR3);

### PD-L1:

[0189] 9) VH region (SEQ ID NO: 350) comprising the amino acid sequences of SEQ ID NO: 218 (VH-CDR1), SEQ ID NO: 219 (VH-CDR2) and SEQ ID NO: 220 (VH-CDR3), and VL region (SEQ ID NO: 351) comprising the amino acid sequences of SEQ ID NO: 221 (VL-CDR1), SEQ ID NO: 222 (VL-CDR2) and SEQ ID NO: 223 (VL-CDR3);
[0190] 10) VH region (SEQ ID NO: 352) comprising the amino acid sequences of SEQ ID NO: 224 (VH-CDR1), SEQ ID NO: 225 (VH-CDR2) and SEQ ID NO: 226 (VH-CDR3), and VL region (SEQ ID NO: 353) comprising the amino acid sequences of SEQ ID NO: 227 (VL-CDR1), SEQ ID NO: 228 (VL-CDR2) and SEQ ID NO: 229 (VL-CDR3);
[0191] 11) VH region (SEQ ID NO: 354) comprising the amino acid sequences of SEQ ID NO: 230 (VH-CDR1), SEQ ID NO: 231 (VH-CDR2) and SEQ ID NO: 232 (VH-CDR3), and VL region (SEQ ID NO: 355) comprising the amino acid sequences of SEQ ID NO: 233 (VL-CDR1), SEQ ID NO: 234 (VL-CDR2) and SEQ ID NO: 235 (VL-CDR3);

### HER2:

[0192] 12) VH region (SEQ ID NO: 356) comprising the amino acid sequences of SEQ ID NO: 21 (VH-CDR1), SEQ ID NO: 22 (VH-CDR2) and SEQ ID NO: 23 (VH-CDR3), and VL region (SEQ ID NO: 357) comprising the amino acid sequences of SEQ ID NO: 24 (VL-CDR1), SEQ ID NO: 25 (VL-CDR2) and SEQ ID NO: 26 (VL-CDR3);
[0193] 13) VH region (SEQ ID NO: 27) comprising the amino acid sequences of SEQ ID NO: 33 (VH-CDR1), SEQ ID NO: 34 (VH-CDR2) and SEQ ID NO: 35 (VH-CDR3), and VL region (SEQ ID NO: 28) comprising the amino acid sequences of SEQ ID NO: 36 (VL-CDR1), SEQ ID NO: 37 (VL-CDR2) and SEQ ID NO: 38 (VL-CDR3);
   c-Met:
[0194] 14) VH region (SEQ ID NO: 358) comprising the amino acid sequences of SEQ ID NO: 236 (VH-CDR1), SEQ ID NO: 237 (VH-CDR2) and SEQ ID NO: 238 (VH-CDR3), and VL region (SEQ ID NO: 359) comprising the amino acid sequences of SEQ ID NO: 239 (VL-CDR1), SEQ ID NO: 240 (VL-CDR2) and SEQ ID NO: 241 (VL-CDR3);
[0195] 15) VH region (SEQ ID NO: 360) comprising the amino acid sequences of SEQ ID NO: 242 (VH-CDR1), SEQ ID NO: 243 (VH-CDR2) and SEQ ID NO: 244 (VH-CDR3), and VL region (SEQ ID NO: 361) comprising the amino acid sequences of SEQ ID NO: 245 (VL-CDR1), SEQ ID NO: 246 (VL-CDR2) and SEQ ID NO: 247 (VL-CDR3);
[0196] 16) VH region (SEQ ID NO: 362) comprising the amino acid sequences of SEQ ID NO: 248 (VH-CDR1), SEQ ID NO: 249 (VH-CDR2) and SEQ ID NO: 250 (VH-CDR3), and VL region (SEQ ID NO: 363) comprising the amino acid sequences of SEQ ID NO: 251 (VL-CDR1), SEQ ID NO: 252 (VL-CDR2) and SEQ ID NO: 253 (VL-CDR3);

### Trop-2:

[0197] 17) VH region (SEQ ID NO: 364) comprising the amino acid sequences of SEQ ID NO: 254 (VH-CDR1), SEQ ID NO: 255 (VH-CDR2) and SEQ ID NO: 256 (VH-CDR3), and VL region (SEQ ID NO: 365) comprising the amino acid sequences of SEQ ID NO: 257 (VL-CDR1), SEQ ID NO: 258 (VL-CDR2) and SEQ ID NO: 259 (VL-CDR3);
[0198] 18) VH region (SEQ ID NO: 366) comprising the amino acid sequences of SEQ ID NO: 260 (VH-CDR1), SEQ ID NO: 261 (VH-CDR2) and SEQ ID NO: 262 (VH-CDR3), and VL region (SEQ ID NO: 367) comprising the amino acid sequences of SEQ ID NO: 263 (VL-CDR1), SEQ ID NO: 264 (VL-CDR2) and SEQ ID NO: 265 (VL-CDR3);

### DLL3:

[0199] 19) VH region (SEQ ID NO: 368) comprising the amino acid sequences of SEQ ID NO: 266 (VH-CDR1), SEQ ID NO: 267 (VH-CDR2) and SEQ ID NO: 268 (VH-CDR3), and VL region (SEQ ID NO: 369) comprising the amino acid sequences of SEQ ID NO: 269 (VL-CDR1), SEQ ID NO: 270 (VL-CDR2) and SEQ ID NO: 271 (VL-CDR3);
[0200] 20) VH region (SEQ ID NO: 370) comprising the amino acid sequences of SEQ ID NO: 272 (VH-CDR1), SEQ ID NO: 273 (VH-CDR2) and SEQ ID NO: 274 (VH-CDR3), and VL region (SEQ ID NO: 371) comprising the amino acid sequences of SEQ ID NO: 275 (VL-CDR1), SEQ ID NO: 276 (VL-CDR2) and SEQ ID NO: 277 (VL-CDR3);

### BCMA:

[0201] 21) VH region (SEQ ID NO: 372) comprising the amino acid sequences of SEQ ID NO: 278 (VH-CDR1), SEQ ID NO: 279 (VH-CDR2) and SEQ ID NO: 280 (VH-CDR3), and VL region (SEQ ID NO: 373) comprising the amino acid sequences of SEQ ID NO: 281 (VL-CDR1), SEQ ID NO: 282 (VL-CDR2) and SEQ ID NO: 283 (VL-CDR3);

### LIV-1:

[0202] 22) VH region (SEQ ID NO: 374) comprising the amino acid sequences of SEQ ID NO: 284 (VH-CDR1), SEQ ID NO: 285 (VH-CDR2) and SEQ ID NO: 286 (VH-CDR3), and VL region (SEQ ID NO: 375) comprising the amino acid sequences of SEQ ID NO: 287 (VL-CDR1), SEQ ID NO: 288 (VL-CDR2) and SEQ ID NO: 289 (VL-CDR3);

### GPC-3:

[0203] 23) VH region (SEQ ID NO: 87) comprising the amino acid sequences of SEQ ID NO: 99 (VH-CDR1), SEQ ID NO: 100 (VH-CDR2) and SEQ ID NO: 101 (VH-CDR3), and VL region (SEQ ID NO: 88) comprising the amino acid sequences of SEQ ID NO: 102 (VL-CDR1), SEQ ID NO: 103 (VL-CDR2) and SEQ ID NO: 104 (VL-CDR3);

### FGFR2:

[0204] 24) VH region (SEQ ID NO: 376) comprising the amino acid sequences of SEQ ID NO: 290 (VH-CDR1), SEQ ID NO: 291 (VH-CDR2) and SEQ ID NO: 292 (VH-CDR3), and VL region (SEQ ID NO: 377) comprising the amino acid sequences of SEQ ID NO: 293 (VL-CDR1), SEQ ID NO: 294 (VL-CDR2) and SEQ ID NO: 295 (VL-CDR3);
[0205] 25) VH region (SEQ ID NO: 378) comprising the amino acid sequences of SEQ ID NO: 296 (VH-CDR1), SEQ ID NO: 297 (VH-CDR2) and SEQ ID NO: 298 (VH-CDR3), and VL region (SEQ ID NO: 379) comprising the amino acid sequences of SEQ ID NO: 299 (VL-CDR1), SEQ ID NO: 300 (VL-CDR2) and SEQ ID NO: 301 (VL-CDR3);

### FGFR3:

[0206] 26) VH region (SEQ ID NO: 380) comprising the amino acid sequences of SEQ ID NO: 302 (VH-CDR1), SEQ ID NO: 303 (VH-CDR2) and SEQ ID NO: 304 (VH-CDR3), and VL region (SEQ ID NO: 381) comprising the amino acid sequences of SEQ ID NO: 305 (VL-CDR1), SEQ ID NO: 306 (VL-CDR2) and SEQ ID NO: 307 (VL-CDR3);

### VEGFR2:

[0207] 27) VH region (SEQ ID NO: 382) comprising the amino acid sequences of SEQ ID NO: 308 (VH-CDR1), SEQ ID NO: 309 (VH-CDR2) and SEQ ID NO: 310 (VH-CDR3), and VL region (SEQ ID NO: 383) comprising the amino acid sequences of SEQ ID NO: 311 (VL-CDR1), SEQ ID NO: 312 (VL-CDR2) and SEQ ID NO: 313 (VL-CDR3);

### CD20:

[0208] 28) VH region (SEQ ID NO: 384) comprising the amino acid sequences of SEQ ID NO: 314 (VH-CDR1), SEQ ID NO: 315 (VH-CDR2) and SEQ ID NO: 316 (VH-CDR3), and VL region (SEQ ID NO: 385) comprising the amino acid sequences of SEQ ID NO: 317 (VL-CDR1), SEQ ID NO: 318 (VL-CDR2) and SEQ ID NO: 319 (VL-CDR3);
[0209] 29) VH region (SEQ ID NO: 386) comprising the amino acid sequences of SEQ ID NO: 320 (VH-CDR1), SEQ ID NO: 321 (VH-CDR2) and SEQ ID NO: 322 (VH-CDR3), and VL region (SEQ ID NO: 387) comprising the amino acid sequences of SEQ ID NO: 323 (VL-CDR1), SEQ ID NO: 324 (VL-CDR2) and SEQ ID NO: 325 (VL-CDR3);

### CD38:

[0210] 30) VH region (SEQ ID NO: 388) comprising the amino acid sequences of SEQ ID NO: 326 (VH-CDR1), SEQ ID NO: 327 (VH-CDR2) and SEQ ID NO: 328 (VH-CDR3), and VL region (SEQ ID NO: 389) comprising the amino acid sequences of SEQ ID NO: 329 (VL-CDR1), SEQ ID NO: 330 (VL-CDR2) and SEQ ID NO: 331 (VL-CDR3);

### EphA2:

[0211] 31) VH region (SEQ ID NO: 143) comprising the amino acid sequences of SEQ ID NO: 157 (VH-CDR1), SEQ ID NO: 158 (VH-CDR2) and SEQ ID NO: 159 (VH-CDR3), and VL region (SEQ ID NO: 145) comprising the amino acid sequences of SEQ ID NO: 160 (VL-CDR1), SEQ ID NO: 161 (VL-CDR2) and SEQ ID NO: 162 (VL-CDR3).

[0212] Table 2 below shows the nucleotide sequence and the polypeptide sequence of an exemplary signal sequence for efficient expression of the fusion proteins according to various embodiments. When the above antibodies are expressed in mammalian cells, SEQ ID NO: 333 may be used as the signal sequence, but is not limited thereto.

TABLE 2

| Name | Sequence | SEQ ID NO |
|---|---|---|
| Nucleotide | ATGACACGCCTCACAGTTCTTG | 332 |
| sequence | CCTTGCTGGCTGGACTTCTTGC | |
| | CTCATCCAGGGCA | |
| Polypeptide | MTRLTVLALLAGLLASSRA | 333 |
| sequence | | |

[0213] Table 3 below shows the variable region polypeptide sequences of anticancer antibodies, which are described as antigen-binding sites of various fusion proteins described herein. The fusion proteins according to exemplary embodiments may comprise or consist of these variable region polypeptides.

TABLE 3

| | | | | SEQ |
|---|---|---|---|---|
| Antigen | Antibody | Variable | | ID |
| | | Region | Polypeptide sequence of variable region | NO |
| EGFR | Cetuximab | VH | QVQLKQSGPGLVQPSQSLSITCTVSGFSLTNYGVHWVRQSPGKGLEWLGVI | 334 |
| | | | WSGGNTDYNTPFTSRLSINKDNSKSQVFFKMNSLQSNDTAIYYCARALTYY | |
| | | | DYEFAYWGQGTLVTVSA | |
| | | VL | DILLTQSPVILSVSPGERVSFSCRASQSIGTNIHWYQQRTNGSPRLLIKYA | 335 |
| | | | SESISGIPSRFSGSGSGTDFTLSINSVESEDIADYYCQQNNNWPTTFGAGT | |
| | | | KLELK | |
| | Panitumumab | VH | QVQLQESGPGLVKPSETLSLTCTVSGGSVSSGDYYWTWIRQSPGKGLEWIG | 336 |
| | | | HIYYSGNTNYNPSLKSRLTISIDTSKTQFSLKLSSVTAADTAIYYCVRDRV | |
| | | | TGAFDIWGQGTMVTVSS | |
| | | VL | DIQMTQSPSSLSASVGDRVTITCQASQDISNYLNWYQQKPGKAPkLLIYDA | 337 |
| | | | SNLETGVPSRFSGSGSGTDFTFTISSLQPEDIATYFCQHFDHLPLAFGGGT | |
| | | | KVEIK | |
| | Necitumumab | VH | QVQLQESGPGLVKPSQTLSLTCTVSGGSISSGDYYWSWIRQPPGKGLEWIG | 338 |
| | | | YIYYSGSTDYNPSLKSRVTMSVDTSKNQFSLKVNSVTAADTAVYYCARVSI | |
| | | | FGVGIFDYWGQGTLVTVSS | |
| | | VL | EIVMTQSPATLSLSPGERATLSCRASQSVSSYLAWYQQKPGQAPELLIYDA | 339 |
| | | | SNRATGIPARFSGSGSGTDFTLTISSLEPEDFAVYYCHQYGSTPLIFGGGT | |
| | | | KAEIK | |
| | Imgatuzumab | VH | QVQLVQSGAEVKKPGSSVKVSCKASGFTFTDYKIHWVRQAPGQGLEWNGYF | 340 |
| | | | NPNSGYSTYAQKFQGRYTITADKSTSTAYMELSSLRSEDTAVYYCARLSPG | |
| | | | GYYVNDAWGQGTTYTYSS | |
| | | VL | DIQMTQSPSSLSASYGDRYTITCRASQGINNYLNWYQQKPGKAPERLIYNT | 341 |
| | | | NNLQTGVPSRFSGSGSGTEFTLTISSLQPEDFATYYCLQHNSFPTFGQGTK | |
| | | | LEIK | |
| | Depatuxizumab | VH | QVQLQESGPGLVKPSQTLSLTCTVSGYSISSDFAWNWIRQPPGKGLEWMGY | 342 |
| | | | ISYSGNTRYQPSLKSRITISRDTSKNQFFLKLNSVIAADTATYYCVTAGRG | |
| | | | FPYWGQGTLVTVSS | |
| | | VL | DIQMTQSPSSMSVSVGDRVTITCHSSQDINSNIGWLQQKTGKSFKGLIYHG | 343 |
| | | | INLDDGVPSRFSGSGSGTDYTLTISSLQPEDFATYYCVQYAQFPWTFGGGT | |
| | | | ELEIK | |
| | Losatuxiszumab | VH | EVQLQESGPGLVKPSQTLSLTCTYSGYSISRDFAWNWIRQPPGKGLEWMGY | 344 |
| | | | ISYNGNTRYQPSLESRITISRDTSKNQFFLELNSVTAADTATYYCVTASRG | |
| | | | FPYWGQGTLVTVSS | |
| | | VL | DIQMTQSPSSMSVSVGDRVTITCHSSQDINSNIGWLQQKPGKSFKGLIYHG | 345 |
| | | | TNLDDGVPSRFSGSGSGTDYTLTISSLQPEDFATYYCVQYAQFPWTFGGGT | |
| | | | KLEIK | |
| EGFRv | Etevritamab | VH | QVQLVESGGGNVQSGRSLRLSCAASGFTFRHYGNHIVRQADGKCLEWYAVI | 346 |
| III | | | WYDGSDKYYADSYRGRFTISRDNSENTLYLQMNSLRAEDTAVYYCARDGYD | |
| | | | ILTGNPRDEDYWGQGILVTVSS | |
| | | VL | DTVMTQTPLSSHVTLGQPASISCRSSQSLVHSDGNTYLSWLQQRPGQPPRL | 347 |
| | | | LIYRISRRFSGVPDRFSGSGAGTDFTLEISRVEAEDVGVYYCMQSTHVPRT | |
| | | | FGCGTKVEIK | |
| | ANG-505 | VH | QVQLVESGGGVVQFGRSLRLSCAASGFTFSSYGMHNVRQAPGEGLEWVAVI | 348 |
| | | | WYDGSNEYYVDSVEGRFTISNQNSKNTLYLQMNSLRAEDTAVYYCARDGWQ | |
| | | | QLAPFDYWGQGTLVTVSS | |
| | | VL | DIVMTQTTLSSPVTLGQPASISCRSSQSLVHSDGNTYLSWLHQRFGQPPRL | 349 |
| | | | LIYKISNRFSGVPDRFSGSGAGTAFTLEISKVEAEDVGVYYCMQATQLPRI | |
| | | | FGQGIKVEIK | |
| PD-L1 | Atezolizumab | VH | EVQLVESGGGLVQPGGSLRLSCAASGFTFSDSWIHNVRQANGKGLEWYAWI | 350 |
| | | | SPYGGSTYYADSVEGRFTISADTSKNTAYLQMNSLRAEDTAVYYCARRHWP | |
| | | | GGFDYWGQGILVIVSS | |
| | | VL | DIQMTQSPSSLSASNGDKVTITCRASQDVSTAVAWYQQEFGKAPKLLIYSA | 351 |
| | | | SFLYSGVTSRESGSGSGIDFTLTISSLQPEDFATYYQQQYLYHPATFGQGT | |
| | | | EVEIK | |
| | Avelumab | VH | EVQLLESGGGLVQPGGSLRLSCAASGFTFSSYIMMWVRQAPGKGLEWVSSI | 352 |
| | | | YTSGGITFYADTVKGRFTISKDNSKNTLYLQNNSLRAEDTAVYYCARIKLG | |
| | | | TVTTVDYWGQGTLVTVSS | |
| | | VL | QSALTQPASVSGSPGQSITISCTGTSSDVGGYNYVSWYQQHPGKAPELMIY | 353 |
| | | | DVSNRPSGVSNRFSGSKSGNTASLTISGLQAEDEADYYCSSYTSSSTRVFG | |
| | | | TGTKYTYL | |
| | Durvalumab | VH | EVQLVESGGGLYQDGGSLRLSCAASGFTFSRYWMSNVRQAPGKGLEWVANT | 354 |
| | | | KQDGSEKYYVDSVEGRFTISRDNAKNSLYLQMNSLRAEDTAVYYCAREGGW | |
| | | | FGELAFDYWGQGILYTVSS | |
| | | VL | EIVLTQSPGTLSLSPGERATLSCRASQRYSSSYLAWYQQKPGQAPRLLTYD | 355 |
| | | | ASSRATGIPDRFSGSGSGTDFTLTISRLEPEDFAVYYCQQYGSLFWTFGQG | |
| | | | TKVEIK | |
| HER2 | Trastuzumab | VH | EVQLVESGGGLVQNGGSLRISCAASGFNIKDTYIHWVRQAPGKGLENVARI | 356 |
| | | | YTTNGYTEYADSVEGRFTISADTSKNTAYLQMNSLRAEDTAVYYCSRWGGD | |
| | | | GFYAMDYWGQGTLVTVSS | |
| | | VL | DIQMTQSPSSLSASVGDRVTITCRASQDVNTAVAWYQQKPGKAPELLIYSA | 357 |
| | | | SFLYSGVPSRFSGSRSGIDFTLTISSLQPEDFATYYCQCHYTITPTFGQGT | |
| | | | KVEIK | |
| | Pertuzumab | VH | EVQLVESGGGLVQPGGSLRLSCAASGFIFTDYINDNVRQAFGKGLEWVADY | 27 |
| | | | NPNSGGSIYNQRFKGRFILSVDRSKNILYLQINSLRAEDTAVYYCARNEGP | |
| | | | SFYFDYWGQGTLVTVSS | |
| | | VL | DIQMTQSPSSLSASVGDRVTITCKASQDVSIGVAWYQQKPGRAPKLLIYSA | 28 |
| | | | SYRYTGVPSRFSGSGSGIDFILTISSLQPEDFATYYCQQYYTYPYTFGQGT | |
| | | | KVEIR | |
| c-Net | Onartuzumab | VH | EVQLVESGGGLVQPGGSLELSCAASGYTFTSYWLHWVRQAPGKGLETVGNI | 358 |
| | | | DFSNSDTRFNPNFKDRFTISADTSKNTAYLQMNSLRAEDTAVYYCATYRSY | |
| | | | VIPLDYWGQGTLVTVSS | |
| | | VL | DIQMTQSPSSLSASVGDRYTITCKSSQSLLYTSSQKNYLAWYQQKPGKAPK | 359 |
| | | | LLIYWASTRESGVFSRFSGSGSGTDFTLTISSLQPEDFATYYCQQYYAYPW | |
| | | | TFGQGTKVEIK | |
| | Emibetuzumab | VH | QVQLVQSGAEVEKPGASVKVSCKASGYTFTDYYMHWVRQAPGQGLEWMGRV | 360 |
| | | | NPNRRGTTYNQKFEGRVTMTTDTSTAYMELRSLRSDDTAVYYCARANWL | |
| | | | DYWGQGTTVTVSS | |
| | | VL | DIQMTQSPSSLSASVGDRYTITCSVSSSVSSTYLHTYQQKPGKAPELLIYS | 361 |
| | | | TSNLASGVPSRFSGSGSGTDFILTISSLQPEDFATYYCQVYSGYPLTFGGG | |
| | | | TEVEIK | |
| | Telisotuzumab | VH | QVQLVQSGAEVEKPGASVKYSCKASGYIFTAYIMHWVRQAFGQGLEWMGWI | 362 |
| | | | KPNNGLANYAQKFQGRYTMIRDTSISTAYMELSRLRSDDTAVYYCARSEIT | |
| | | | TEFDYWGQGILVTVSS | |
| | | VL | DIVWTQSPDSLAVSLGERATINCKSSESVDSYANSRLHWYQQKPGQPPKLL | 363 |
| | | | IYRASTRESGVPDRFSGSGSGTDFTLTISSLQAEDVAVYYCQQSKEDPLTF | |
| | | | GGGTKVEIK | |
| TROP-2 | Datopotamab | VH | QVQLVQSGAEVKKPGASVKVSCKASGYTFITAGMQWVRQAPGQGLEWMGWI | 364 |
| | | | NTHSGVPKYAEDFKGRVTISADTSTSTAYLQLSSLKSEDTAVYYCARSGFG | |
| | | | SSYWYFDVWGQGTLVTVSS | |
| | | VL | DIQMTQSPSSLSASVGDRVTITCKASQDVSTAVAWYQQKPGKAPKLLIYSA | 365 |
| | | | SYRYTGVPSRFSGSGSGTDFTLTISSLQPEDFAVYYCQQHYITPLTFGQGT | |
| | | | KLEIK | |
| | Sac [symbol] tuzumab | VH | QVQLQQSGSELKKPGASVKVSCKASGYTFTNYGMNWVKQAPGQGLKWMGWI | 366 |
| | | | NTYTGEPTYTDDFKGRFAFSLDTSVSTAYLQISSLKADDTAVYFCARGGFG | |
| | | | SSYWYFDVWGQGSLVTVSS | |
| | | | DIQLTQSPSSLSASVGDRVSITCKASQDVSIAVAWYQQKPGKAPKLLIYSA | 367 |
| | | | SYRYTGVPDRFSGSGTDFTLTISSLQPEDFAVYYCQQHYITPLTFGAGTKV | |
| | | | EIK | |
| DLL3 | Rovalpituzumab | VH | QVQLVQSGAEVKKPGASVKVSCKASGYTFTNYGMNWVRQAPGQGLEWMGWI | 368 |
| | | | NTYTGEPTYADDFKGRVTMTIDTSTSTAYMELRSLRSDDTAVYYCARIGDS | |
| | | | SPSDYWGQGTLVTVSS | |
| | | VL | EIVMTQSPATLSVSPGERAILSCKASQSVSNDVVWYQQRIGQAPRLLIYYA | 369 |
| | | | SNRYTGIPARFSGSGSGTEFTLTISSLQSEDFAVYYCQQDYTSPWTFGQGT | |
| | | | KLEIK | |
| | Tar [symbol] atamab | VH | QVQLQESGPGLVKPSETLSLTCTVSGGSISSYYWSWIRQPPGKCLEWIGYV | 370 |
| | | | YYSGTTNYNPSLKSRVTISVDISKNQFSLKLSSVIAADTAVYYCASIAVTG | |
| | | | FYFDYWGQGILVTVSS | |
| | | | EIVLTQSPGTLSLSPGERVILSCRASQRVNNNYLAWYQQRPGQAPRLLIYG | 371 |
| | | | ASSRATGIPDRFSGSGSGTDFTLTISRLEPEDFAVYYCQQYDRSELTFGCG | |
| | | | TKLEIK | |
| BCMA | Belantamab | VH | QVQLVQSGAEVEKPGSSVKVSCKASGGTFSVYWMHWYRQAPGQGLETMGAT | 372 |
| | | | YRGHSDTYYNQKFKGRVTITADESTSTAYMELSSLRSEDTAVYYCARGAIY | |
| | | | DGYDVLDNWGQGTLVTVSS | |
| | | | DIQMTQSPSSLSASVGDRVTITCSASQDISNYLNWYQQRPGKAPELLIYYT | 373 |
| | | | SNLHSGVPSRFSGSGSGIDFTLTISSLQPEDFATYYCQQYRKLFTIFGQGI | |
| | | | KLEIK | |
| LIV-1 | Ladiratuzumab | VH | QVQLVQSGAEVEKTGASVEYSCKASGLTIEDYYMHWVRQAPGQGLETMGWI | 374 |
| | | | DRENGDTEYGPKFQGRVTMTRQTSINTAYMELSRLESDDTAVYYCAVHNAH | |
| | | | YGTWFAYWGQGTLVTVSS | |
| | | | DVVMTQSPLSLPVTLGQPASISCRSSQSLLHSSGNTYLEWYQQRPGQSPRP | 375 |
| | | | LIYKISTRFSGVPDRFSGSGSGTDFILKISRVEAEDVGVYYCFQGSHYPYT | |
| | | | FGGGTKVEIK | |
| GPC-3 | Codrituzumab | VH | QVQLVQSGAEVKKPGASVKVSCKASGYTFTDYEMHWVRQAPGQGLEWMGAL | 87 |
| | | | DPKTGDTAYSQKFKGRVTLTADKSTSTAYMELSSLTSEDTAVYYCTRFYSY | |
| | | | TYWGQGTLVTVSS | |
| | | VL | DVVMTQSPLSLPVTPGEPASISCRSSQSLVHSNRNTYLHWYLQKPGQSPQL | 88 |
| | | | LIYKVSNRFSGVPDRFSGSGSGTDFTLKISRVEAEDVGVYYCSQNTHYPPT | |
| | | | FGQGTELEIK | |
| FGFR2 | Aprutumab | VH | EVQLLESGGGLVQPGGSLRLSCAASGFTFSSYAMSWVRQAPGKGLEWVSAI | 376 |
| | | | SGSGTSTYYADSVKGRATISRDNSKNTLYLQMNSLRAEDTAVYYCARVRYN | |
| | | | WNHGDWFDPWGQGTLVTVSS | |
| | | 11 | QSVLTQPPSASGTPGQRVTISCSGSSSNIGNNYVSWYQQLPGTAPELLIYE | 377 |
| | | | NYNRPAGVPDRFSGSKSGTSASLAISGLRSEDEADYYCSSWDDSLNYWVFG | |
| | | | GGTKLTVL | |
| | Bemaritusumab | VH | QVQLVQSGAEVKKPGSSVKVSCKASGYIFTTYNVHWVRQAPGQGLEWIGSI | 378 |
| | | | YPDNGDTSYNQNFKGRATITADKSTSTAYMELSSLRSEDTAVYYCARGDFA | |
| | | | YWGQGTLVTVSS | |
| | | | DIQMTQSPSSLSASVGDRVTITCKASQGYSNDVAWYQQKPGKAPKLLIYSA | 379 |
| | | | SYRYTGVPSRFSGSGSGIDFIFTISSLQPEDIATYYCQQHSTIPYTFGQGT | |
| | | | KLEIK | |
| FGER3 | Vofatamab | VH | EVQLVESGGGLVQPGGSLRLSCAASGFTFTSTGISWVRQAPGKGLEWYGRI | 380 |
| | | | YPTSGSTNYADSVKGRFTISADTSKNTAYLQMNSLRAEDTAVYYCARTYGI | |
| | | | YDLYVDYTEYVMDYWGQGTLVTVSS | |
| | | | DIQMTQSPSSLSASVGDRYTITCRASQDVDTSLAWYKQKPGKAPELLIYSA | 381 |
| | | | SFLYSGVPSRFSGSGSGIDFILTISSLQPEDFATYYCQQSTGHPQTFGQGT | |
| | | | KVEIK | |
| VEGFR 2 | Ramucirumab | VH | EVQLVQSGGGLVKPGGSLRLSCAASGFTFSSYSMNWVRQAPGKGLEWVSSI | 382 |
| | | | SSSSSYIYYADSVKGRFTISRDNAKNSLYLQMNSLRAEDTAVYYCARVTDA | |
| | | | FDIWGQGTMVTVSS | |
| | | VL | DIQMTQSPSSVSASIGDRVTITCRASQGIDNWLGWYQQKPGKAPKLLIYDA | 383 |
| | | | SNLDTGVPSRFSGSGSGTYFTLTISSLQAEDFAVYFCQQAKAFPPTFGGGT | |
| | | | KVDIK | |
| CD20 | Rituximab | VH | QVQLQQPGAELVKPGASVKMSCKASGYTFTSYNMHWVKQTPGRGLEWIGAI | 384 |
| | | | YPGNGDTSYNQKFKGKATLTADKSSSTAYMQLSSLTSEDSAVYYCARSTYY | |
| | | | GGDWYFNVWGAGTTVTVSA | |
| | | VL | QIVLSQSPAILSASPGEKVTMTCRASSSVSYIHWFQQKPGSSPKPWIYATS | 385 |
| | | | NLASGVPVRFSGSGSGTSYSLTISRVEAEDAATYYCQQWTSNPPTFGGGTK | |
| | | | LEIK | |
| | Obinutuzumab | VH | QVQLVQSGAEVKKPGSSVKVSCKASGYAFSYSWINWYRQAPGQGLEWNGRI | 386 |
| | | | FPGDGDTDYNGKFKGRVTITADKSTSTAYMELSSLRSEDTAVYYCARNVFD | |
| | | | GYWLVYWGQGTLVTVSS | |
| | | VL | DIVMTQTPLSLPVIPGETASISCRSSKSLLHSNGITYLYWYLQKPGQSPQL | 387 |
| | | | LIYQMSNLVSGVPDRFSGSGSGTDFTLKISRVEAEDVGVYYCAQNLELPYT | |
| | | | FGGGIKVEIK | |
| CDSS | Daratimumab | VH | EVQLLESGGGLVQPGGSLRLSCAVSGFTFNSFAMSWVRQAPGKGLEWVSAI | 388 |
| | | | SGSGGGTYYADSVKGRFTISRDNSKNTLYLQMNSLRAEDTAVYFCAKDKIL | |
| | | | WFGEPVFDYWGQGTLVTVSS | |
| | | VL | EIVLTQSPATLSLSPGERATLSCRASQSVSSYLAWYQQKPGQAPRLLIYDA | 389 |
| | | | SNRATGIPARFSGSGSGTDFTLTISSLEPEDFAVYYCQQRSNWPPTFGQGT | |
| | | | KVEIK | |
| Eph42 | 1C1 | VH | EVQLLESGGGLVQPGGSLRLSCAASGFTFSHYMMAWVRQAPGKGLEWVSRI | 143 |
| | | | GPSGGPTHYADSVKGRFTISRDNSKNTLYLQMNSLRAEDTAVYYCAGYDSG | |
| | | | YDYVAVAGPAEYFQHWGQGTLVTVSS | |
| | | VL | DIQMTQSPSSLSASVGDRVTITCRASQSISTWLAWYQQKPGKAPKLLTYKA | 145 |
| | | | SNLHTGVPSRFSGSGSGTEFSLTISGLQPDDFATYYCQQYNSYSRTFGQGT | |
| | | | KVEIK | |

[symbol]

indicates data missing or illegible when filed

[0214] Table 4 below shows the nucleotide sequences encoding variable regions of anticancer antibodies, which are described as antigen-binding sites of various fusion proteins described herein.

TABLE 4

| | | | | SEQ |
|---|---|---|---|---|
| | | Variable | | ID |
| Antigen | Antibody | Region | Nucleotide sequence of variable region | NO |
| EGFR | Cetuximab | VH | CAAGTGCAGCTTAAACAGAGTGGACCAGGGCTCGTTCAGCCTTCTCAAAGTTTG | 390 |
| | | | AGCATAACATGTACCGTAAGTGGTTTTTCACTGACTAACTACGGAGTGCATTGG | |
| | | | GTTCGACAGTCCCCTGGAAAGGGTCTCGAATGGCTTGGAGTTATTTGGAGTGGC | |
| | | | GGTAACACTGACTACAACACACCATTCACCTCTCGGCTGTCTATAAACAAGGAT | |
| | | | AACTCTAAGTCACAGGTCTTTTTCAAGATGAACAGCCTCCAAAGTAACGACACC | |
| | | | GCCATCTATTACTGTGCAAGAGCCTTGACCTACTACGATTACGAGTTTGCCTAT | |
| | | | TGGGGTCAGGGAACTCAAAGTCAGTGCT | |
| | | VL | GACATCCTTCTCACTCAGTCCCCCGTAATTCTGAGCGTGTCTCCCGGCGAGCGC | 301 |
| | | | GTCAGTTTCTCATGCAGGGCTAGCCAGAGTATAGGTACTAACATTCATTGCTAT | |
| | | | CAACAGCGAACCAACGGCTCACCCCGCTTGCTTATCAAATATGCCTCTGAGAGT | |
| | | | ATCTCTGGCATTCCATCCCGTTTTAGCGGTAGTGGTTCAGGAACAGATTTCACT | |
| | | | CTTTCAATTAACTCTGTAGAATCAGAAGACATAGCCGATTATTATTGTCAGCAA | |
| | | | AACAACAATTGGCCTACTACATTTGGAGCTGCTACAAAACTGGAACTCAAG | |
| | Panitumumab | VH | CAGGTACAACTGCAAGAGAGCGGACCTGGGTTGGTAAAGCCAAGTGAGACCCTG | 392 |
| | | | TCACTTACTTGCACACTATCAGGAGGAAGTGTCTCAAGTGGCGATTACTATTGG | |
| | | | ACTTCGATTCGACAAAGCCCCGGAAAAGGATTGGAATGGATCCGCCACATATAT | |
| | | | TATTCAGGAAATACCAACTATAATCCCAGTCTTAAATCTCGGCTTACCATTAGC | |
| | | | ATTGACACTTCCAAAACCCAATTTTCACTTAAACTGAGTTCTGTGACTGCTGCC | |
| | | | GACACTCCTATATACTACTGCGTCCGCGACCGGGTCACTGGGGCTTTTGATATA | |
| | | | TGGGGACAAGGAACTATGGTTACTGTATCATCT | |
| | | | GATATTCAAATGACCCAATCTCCTTCATCACTCTCAGCATCAGTCGCGGATAGA | 393 |
| | | | GTGACAATAACTTGCCAAGCAAGCCAGGATATATCTAATTATCTCAACTCGTAT | |
| | | | CAACAAAAGCCAGGTAAAGCTCCAAAGTTGTTGACTTACGATGCCTCTAATCTC | |
| | | | GAGACCGGCGTACCAAGTAGGTTCAGTGGTTCAGGAAGTGGGACTGATTTCACT | |
| | | | TTTACCATTTCTTCTCTCCAGCCCGAAGACATACCAACTTATTTCTGTCAACAC | |
| | | | TTCGATCATCTTCCTACAAAGTTGAAATCAAG | |
| | Necitumumab | VH | CAGGTACAACTCCAGGAATCCGGTCCTGGTCTCGTAAAGCCATGCCAAACATTG | 394 |
| | | | AGTTTGACCTGCACAGTCACTGGTGGCAGTATTTCCTCAGCCGATTATTACTGG | |
| | | | AGTTGGATACGCCAGCCACCCGGTAAGGGATTGGAATGGATCGGTTATATATAC | |
| | | | TACTCTGGATCTACAGACTATAATCCTTCCCTGAAGTCCAGGGTTACCATGAGT | |
| | | | GTTGACACATCCAAAAACCAGTTCTCCTTGAAGGTCAACTCTGTGACCGCTGCC | |
| | | | GATACTGCCCTTTATTATTGTGCACCTGTATCTATCTTCGGAGTAGGCACCTTT | |
| | | | GACTATTGGGTCAAGGCACCCTGGTCACCGTGTCATCT | |
| | | | GAGATACTAATGACACAGTCACCTCCTACCCTTTCCCTCAGCCCTCGCGAACGC | 395 |
| | | | GCCACCTTGTCTTGCAGGGCTAGCCAAAGTGTATCCTCTTATTTGGCATGGTAT | |
| | | | CAGCAGAAACCAGGGCAAGCCCCACGGCTCCTGATTTATGATGCCTCCAATCGA | |
| | | | GCCACCGGGATTCCTCCCCGATTGAGCGGATCAGGCAGTCGGACTGATTTTACA | |
| | | | TTGACCATTAGCTCTCTGGAGCCTGAGGACTTTGCCGTGTATTATTGTCATCAA | |
| | | | TATGGGAGTACTCCCCTCACATTTGGCGGCGGGACAAAAGCAGAAATTAAA | |
| | Imgatuzumab | VH | CAAGTACAGTTCGTACAAAGTGGGGCCGAGGTCAAGAAACCTGGTTCTAGCGTA | 396 |
| | | | AAGGTTAGCTGCAAGGCAAGCGGCTTCACCTTCACCGATTACAAAATTCATTGG | |
| | | | GTCCCTCAAGCCCCCCGTCACGGCCTTGAATCGATGCGTTATTTCAACCCCAAC | |
| | | | TCTGGTTATTCTACCTATGCACAGAAGTTCCAGGGCCGCCTCACTATAACTGCA | |
| | | | GACAAGTCCACAAGTACAGCCTATATCGAACTGTCCAGTTTGCGTAGCGAGGAT | |
| | | | ACTGCCGTATATTACTGTGCTAGACTCTCACCCGGCGGATATTACGTTATGGAT | |
| | | | GCATGGGGCCAGGGCACCACCGTGACCGTGAGCAGC | |
| | | VL | GACATCCAAATGACACAGTCTCCTTCCTCACTCTCCGCTTCTGTAGGAGATAGA | 397 |
| | | | GTGACAATAACATGCCGTGCTTCACAAGGTATCAATAACTACCTCAATTGGTAT | |
| | | | CAACAGAAACCTGGTAAAGCTCCAAAGCGCCTTATCTATAATACCAACAATCTC | |
| | | | CAGACTGGTGTTCCAAGTAGGTTCTCCGGGAGCGGTAGTGCGACTGAGTTTACA | |
| | | | TTGACAATTTCATCATTGCAACCCGAAGATTTTGCCACCTACTATTGCTTGCAG | |
| | | | CATAATAGTTTTCCCACTTTCGGTCAGGGAACTAAGCTCGAAATAAKA | |
| | Depatuxizumab | VH | CAGGTACAACTCCAAGAATCTGGACCTGGGCTGGTAAAACCATCTCAGACCTTG | 398 |
| | | | AGTCTCACTTGCACTGTGTCCCGTTACTCTATATCTAGCGATTTT [symbol] CATGGAAT | |
| | | | TGGATTCGCCAGCCACCCGGTAAGGGACTGGAGTGGATGGGTTACATTTCATAC | |
| | | | AGTGGAAACACACGTTACCAACCCAGTCTCAAGAGCCGGATAACCATTAGTAGC | |
| | | | GACACAAGCAAAAACCAATTTTTCCTCAAACTGAATTCAGTGACTCCTGCCGAC | |
| | | | ACAGCCACTTACTATTGTGTCACAGCCGGTCGGGGGTTCCCTTACTGGGGACAG | |
| | | | GGTACTCTCCTTACTGTAAGTTCT | |
| | | | GACATACAAATGACTCAATCACCTAGCTCCATGTCTGTTTCCGTTGGCGACCGC | 399 |
| | | | GTAACCATCACCTGTCATTCCTCACAGGATATAAATTCCAATATTGGGTGGCTT | |
| | | | CAGCAGAAACCAGGTAAATCATTCAAGGCCCTTATTTATCACCGGACCAACCTT | |
| | | | GATGACGGTGTCCCCTCTCGCTTTAGCGGTTCTGGATCAGGTACAGATTATACC | |
| | | | CTGACCATCTCTTCTCTCCAGCCCGAGGATTTCGCTACTTACTACTGTGTGCAA | |
| | | | TACGCACAGTTCCCCTGGGACATTCGGCGGTGGAACTAAACTGGAGATAAAG | |
| | Losatuxizumab | VH | GAAGTTCAGTTGCAAGAAAGTGGCCCCGGACTTGTTAAACCATCCCAGACCTTG | 400 |
| | | | AGCCTGACTTGCACCGTTTCTGCCTATTCTATTTCCCGCGACTTCGCATCGAAC | |
| | | | TGGATACGCCAACCTCCCGGCAAGGGCTTGGAGTGGATGGGGTATATCTCCTAT | |
| | | | AACGGCAATACACGCTATCAACCTAGTTTGAAGAGCCGCATAACCATCAGTAGA | |
| | | | GACACAAGTAAAAACCAATTCTTCTTGAAACTGAATAGTGTGACCGCTGCAGAC | |
| | | | ACTGCAACCTATTACTGCGTCACAGCCAGTCGGGGGTTTCCATATTGCGGTCAA | |
| | | | CGTACACTTGTAACCGTGTCTTCA | |
| | | VL | GATATACAAATGACCCACTCCCCTTCCTCCATGTCTGTCAGCGTCGCTGATAGG | 401 |
| | | | GTTACCATAACTTGTCATAGCAGCCAAGACATAAACAGCAATATAGGTTCGCTG | |
| | | | CAACAAAAGCCCCGTAAATCTTTCAAGGGGTTGATTTACCACGGAACTAACETC | |
| | | | GATGATGGTGTGCCCAGTCGCTTTTCAGGTAGTGGGTCTGGAACAGACTACACC | |
| | | | CTGACAATCTCCAGTTTGCAACCAGAAGACTTTGCTACTTATTATTGTGTACAG | |
| | | | TACCCTCAATTTCCTTGGACTTTCGGGGGAGGAACCAAACTTGAGATCAAG | |
| EGFR | Etevritamab | VH | CAAGTCCAACTCGTGGAGTCTGGAGGCGGTGTGGTCCAAAGCGGGAGATCCTTG | 402 |
| VIII | | | CGGCTGTCTTGCGCAGCATCAGGGTTTACATTTAGGAACTACGGCATGCAGTGG | |
| | | | GTTAGACAGGCACCCGGTAAGTGTCTTGAATGGGTAGCAGTAATCTGGTATGAT | |
| | | | GACAACTCAAAGAACACTTTGTACCTCCAAATGAACTCTCTGAGGGCCGAGGAT | |
| | | | ACAGCTGTATATTACTCTGCTAGGGATGGCTATGACATACTCACCCGCAACCCA | |
| | | | CGGGATTTCCATTACTGGGGGCAAGGGACATTGGTAACAGTTTCATCT | |
| | | VL | GATACAGTAATGACCCAGACTCCTCTGAGTAGTCATCTTACACTCGGCCAGCCT | 403 |
| | | | GCCTCTATCTCCTGTCGTTCAAGTCAGAGTCTGGTGCACTCAGACGGAAACACC | |
| | | | TACCTTTCATGGTTGCAACAGCGTGGTGGTCAACCTCCTCGATTGTTGATATAC | |
| | | | AGAATTAGTCGGCGTTTTTCTGGCGTCCCAGATCGCTTCTCCGGCTCAGGTGCC | |
| | | | GGAACAGACTTCACCCTTGAGATCAGTCGAGTGGAGGCTGAGGATGTGGGCGTA | |
| | | | TATTACTGTATGCAAAGCACTCACGTGCCAAGGACATTCGGGTGTGGAACCAAG | |
| | | | GTAGAGATCAAA | |
| | AMG-595 | VH | CAGGTGCAGTTGGTTGAGAGCGGCGGAGGTGTGGTACAGCCTGGAAGGAGTCTG | 404 |
| | | | CGACTCTCATGTGCCGCCTCCGGTTTTACATTTTCTTCCTACGGCATGCATTGG | |
| | | | GTTCGACAAGCACCAGGCAAGGGATTGGAATGGGTCGCAGTAATTTCGTACGAC | |
| | | | GGGTCAAATAAATACTATGTTGACAGCGTGAAAGGGCGATTCACTATCAGTCGT | |
| | | | GACAATAGTAAAAACACTTTGTATCTGCAAATGAATAGTCTGAGGGCAGAGGAC | |
| | | | ACAGCAGTCTATTACTGTGCTCGTGATGGTTGGCAACAGCTTGCCCCTTTTGAC | |
| | | | TATTGGGGACAAGGAACTTTGGTAACAGTAAGCAGC | |
| | | VL | GACATTGTTATGACACAAACACCTTTGTCCTCACCCGTAACACTGGGCCAACCT | 405 |
| | | | GCCTCCATATCCTGCCGAAGCAGTCAATCACTTGTCCACTCTGATGCGAATACC | |
| | | | TACTTGTCATGGCTGCATCAGCGACCAGGTCAGCCTCCAAGGCTTCTCATATAT | |
| | | | AAAATATCCAATCGTTTTTCAGGTGTTCCCGACCGTTTCTCCGGCTCAGGGGCC | |
| | | | GGAACCGCCTTCACTCTCAAAATATCCAGAGTGGAGGCTGAAGACGTAGGTGTA | |
| | | | TATTATTGTATGCAAGCCACCCAGTTGCCACGCACCTTTGGGCAAGGGACTAAA | |
| | | | GTAGAAATAAAG | |
| PD-L1 | Atezolizumab | VH | GAAGTTCAACTGGTGGAGTCTGGAGGGGGTCTCGTCCAGCCCGGCGGGAGCTTG | 406 |
| | | | AGACTGTCTTGTGCTGCATCOGGOTTTACCTTTAGCGATTOCTGGATACACTGG | |
| | | | GTAAGACAAGCACCTGGTAAAGGGTTGGAATGGGTGGCATGOATTTOCCCATAC | |
| | | | GGGGGATCAACCTATTATGCTGATAGCGTGAAGGGCCGGTTTACTATTTCAGCC | |
| | | | GACACAAGCAAGAACACCGCCTACCTCCAAATGAATTCTCTGAGGGCCGAGGAC | |
| | | | ACAGCAGTCTATTACTGTGCTAGGAGGCATTGGCCCGGCGGATTCGACTACTGG | |
| | | | GGGCAGGGCACTCTGGTCACAGTAAGCTCA | |
| | | VL | GACATCCAAATGACACAGTCTCCAAGCTCTCTCTCCGCAAGCGTGGGCGATCGG | 407 |
| | | | GTCACAATAACATGCCGCGCCTCACAAGACGTGTCTACAGCCGTTGCTTGGTAT | |
| | | | CAGCAAAAGCCCGGAAAAGCTCCCAAACTGCTCATTTATTCAGCCAGCTTTCTC | |
| | | | TACAGCGGGGTGCCAAGCCGGTTCAGTGGGAGCGGAAGTGGCACCCACTTTACT | |
| | | | CTTACCATCTCCTCTCTGCAACCCGAAGACTTCGCCACCTATTACTGCCAGCAA | |
| | | | TACCTGTATCATCCAGCTACTTTCGGGCAAGGGACCAAGGTTGAAATCAAA | |
| | Avelumab | VH | GAGGTTCAGCTTCTGGAGTCAGGAGGTGGTCTTGTTCAACCCGGAGGGTCTCTC | 408 |
| | | | CGTTTGTCCTGCGCCGCAAGTGGGTTCACATTTTCCAGTTATATCATGATGTGG | |
| | | | GTGAGGCAAGCCCCTGGGAAAGGATTGGAGTGGGTCTCATCTATTTATCCATCT | |
| | | | GGAGGTATTACATTCTATGCCGACACAGTTAAGGGCAGGTTTACTATAAGCCGC | |
| | | | GATAATTCCAAAAACACCCTGTACCTGCAAATGAATTCACTGCGAGCCGAGGAC | |
| | | | ACTGCTGTCTACTATTGCGCCAGAATCAAACTGGGGACAGTAACAACTGTAGAC | |
| | | | TATTGGGGGCAGGGGACTTTGGTCACTGTATCATCA | |
| | | VL | CAGTCAGCTCTGACACAGCCCGCATCTGTCTCTGGGAGTCCCGGACAGTCAATA | 409 |
| | | | ACTATATCATGCACAGGGACCTCCTCTGATGTTGGGGGATACAATTACGTGTCC | |
| | | | TGGTATCACCAGCACCCOOGCAAGGOCCCCAAACTCATGATATACGACGTTTCA | |
| | | | AATCGTCCTTCAGGCGTGTCTAACAGATTTTCCGGTTCTAAATCAGGCAATACC | |
| | | | GCTTCCTTGACTATCTCAGGACTTCAAGCAGAGGATGAAGCAGACTATTACTGC | |
| | | | TCAAGCTATACCTCCAGTTCTACTAGAGTGTTCGGTACAGGAACTAAGGTAACA | |
| | | | GTGCTG | |
| | Durvalumab | VH | GAGGTTCAGCTOGTOGAGAGTGGGGGGGGACTTGTTCAGCCAGGCGGTTCATTG | 410 |
| | | | CGGTTGTCTTGTGCCGCCTCAGGATTTACATTCTCAAGATACTGGATGAGCTGG | |
| | | | GTGAGGCAAGCACCCGGTAAAGGTCTCGAGTGGGTAGCTAATATCAAACAAGAT | |
| | | | GGGAGCGAGAAGTATTATGTTGACAGCGTGAAGGGTCGCTTTACCATATCAAGG | |
| | | | GATAACGCTAAGAACTCCCTTTATCTTCAGATGAATAGTCTCCGCGCTGAGGAC | |
| | | | ACCGCAGTATATTACTGTGCTAGGGAAGGAGGGTGGTTTGGGGAATTGGCATTC | |
| | | | GATGGACTGGGGTCAGGGTACTCTCGTTACAGTCAGTTCC | |
| | | VL | GAAATCGTTTTGACACAGAGCCCTGGGACACTGTCCTTGAGCCCAGGAGAACGC | 411 |
| | | | GCAACCCTCTCCTGCCGTGCAAGTCAGCGTGTTTCCTCATCTTAGGTTGCTTGG | |
| | | | TATCAACAAAAGCCAGGGCAGGCTCCTAGACTGCTTATCTATGACGCTTCTAGC | |
| | | | AGAGCTACTGGGATACCAGATAGGTTTTCCGGGTCTGGTTCAGGCACAGACTTC | |
| | | | ACCCTCACCATATCTCGACTCGAACCTGAGGATTTTGCAGTGTACTATTGTCAA | |
| HER2 | Trastuzumab | VH | GAAGTGCAGCTGGTCGAAAGTGGCGGTGGACTTGTGCAACCTGGCGGTAGCCTC | 412 |
| | | | CGTCTCAGCTGCGCTGCAAGTGGGTTCAACATCAAGGACACTTATATTCATTGG | |
| | | | GTCCGACAGCCACCTGGGAAAGGTTTGGAGTGGGTCGCACGGATCTATCCCACT | |
| | | | AATGGTTACACAAGATATGCCGATTCAGTAAAAGGCCGGTTTACAATCAGCGCA | |
| | | | GATACTTCAAAAAACACTGCCTATCTTCAAATGAACTCACTTCGAGCAGAAGAC | |
| | | | ACAGCCGTCTATTATTGTAGTCGTTGGGGAGGCGACGGCTTTTATGCTATGGAC | |
| | | | TACTGGGGACAAGGAACTCTGGTCACAGTTTCATCA | |
| | | VL | GATATTCAGATGACTCAGAGTCCTAGTTCCCTCAGCGCCTCCGTAGGCGACAGA | 413 |
| | | | GTTACAATAACTTGCCGAGCAAGCCAAGACGTAAACACTGCAGTCGCCTGGTAC | |
| | | | CAACAGAAACCAGGCAAAGCTCCAAAACTCTTGATTTACAGTGCTTCCTTCCTT | |
| | | | TATAGTGGCGTTCCAAGCCGCTTCAGCGGCAGCCGCTCTGGCACCGACTTCACT | |
| | | | CTCACTATTTCTTCCTTGCAACCTGAAGACTTCGCCACTTATTATTGCCAGCAA | |
| | | | CACTACACAACACCCCCAACATTCGGACAGGGCACAAAGGTAGAAATAAAA | |
| | Pertazumab | VH | GAAGTGCAACTGGTGGAGTCTGGTGGTGGATTGGTGCAGCCAGGCGGTTCTCTG | 414 |
| | | | CGACTTAGTTGTGCAGCCTCCGGCTTTACCTTCACTGATTATACAATGGACTGG | |
| | | | GTTCGGCAGGCACCCGGTAAGGGGCTTGAGTCGCTCCCCGACGTCAATCCTAAT | |
| | | | TCAGGGGGAAGTATTTATAACCAAGGCTTCAAGGGTCGATTTACATTGTCCGTA | |
| | | | GATCGTAGTAMAAATACCCTCTACCTTCAAATGAACTCCCTGAGGGCAGACGAT | |
| | | | ACCGCAGTCTACTACTGCGCTCGTAACCTGGGGCCTAGTTTTTATTTCGATTAT | |
| | | | TGGGGCCAAGGCACATTGGTAACTGTGTCTTCA | |
| | | VL | GATATACAAATGACACAATCTCCTAGTTCATTGAGTGCCTCAGTCGGCGACCGA | 415 |
| | | | GTCACTATAACTTGTAAAGCAAGCCAAGATGTTAGCATTGGCGTAGCTTGGTAT | |
| | | | CAGCAGAAACCTGGAAAAGCACCAAAAGTGCTTATCTACTCCGCTAGTTACCGT | |
| | | | TACACCGGAGTTCCCTCAAGGTTTTCTGGCAGCGGAAGTGGGACTGACTTCACT | |
| | | | CTGACTATTTCTTCACTTCAGCCAGAAGACTTCGCTACTTATTACTGTCAGCAG | |
| | | | TACTATATCTATCCCTATACATTTGGACAAGGAACCAAAGTTGAGATTAAA | |
| c-Met | Onartuzumab | VH | GAAGTGCAACTGGTAGAATCTGGAGGGGGTCTTGTTCAACCTGGGGGCAGTCTC | 416 |
| | | | AGGCTGTCATGTCCAGCAAGTGGATATACATTTACTTCCTATTGGCTCCATTGG | |
| | | | GTACGACAAGCACCTGGGAAAGGGCTGGAATGGGTTGGTATGATCGACCCATCA | |
| | | | AACTCTGACACCCGCTTTAATCCAAATTTTAAAGACCGCTTTACAATATCCGCA | |
| | | | GATACAAGTAAGAACACCGCATATCTCCAGATGAACAGCCTGCGTGCAGAGGAT | |
| | | | ACCGCAGTGTACTACTGTGCAACCTACCGGTCCTATGTAACCCCTCTCGACTAT | |
| | | | TGGGGTCAAGGCACACTTGTCACCGTGAGTAGC | |
| | | VL | GACAATACAAATGACCCAATCACCAAGTTCCCTTTCTGCTTCAGTCGGTGATCG | 417 |
| | | | GTGACAATAACATGCAAATCATCTCAAAGTCTCTTGTACACAAGCAGCCAAAAA | |
| | | | AATTATCTTGCTTGGTACCAGCAGAAGCCAGGGAAAGCACCAAAACTGCTGATC | |
| | | | TACTGGGCTTCAACAAGAGAATCCGGGGTGCCCAGCCGCTTTTCCGGTTCGGGC | |
| | | | AGTGGAACTGATTTCACCCTCACTATTTCCTCATTGCAACCCGAGGACTTCGCA | |
| | | | ACCTATTACTGTCAACAGTATTACGCCTACCCTTGGACATTTGGACAAGGAACT | |
| | | | AAGGTTGAAATTAAA | |
| | Emibetuzumab | VH | CAAGTACAGCTCGTCCAATCCGGCGCTGAAGTCAAGAAGCCCGGAGCTTCCGTT | 418 |
| | | | AAAGTTTCCTCCAAAGCCAGCGGCTACACTTTCACTGATTACTATATGCACTGG | |
| | | | GTTAGACAAGCACCCGGGCAGGGTCTCGAATGGATGGGTAGGGTTAATCCAAAT | |
| | | | CGCAGGGGAACTACTTACAACCAGAAATTTGAGGGGAGGGTTACCATGACTACC | |
| | | | GATACCAGCACATCTACTGCATATATGGAGCTGCGTTCTCTGAGGAGTGATGAT | |
| | | | ACAGCAGTGTACTATTGTGCCCGCGCTAACTGGTTGGACTACTGGGGGCAAGGT | |
| | | | ACAACTGTCACAGTATCTAGC | |
| | | VL | GACATTCAAATGACACAAAAGTCCATCCTCTCTCAGTGCTTCAGTGGGGACCGA | 419 |
| | | | GTAACCATAACATCCAGTGTCTCAAGTAGCGTGAGTAGCATCTACCTCCATTGG | |
| | | | TATCAGCAGAAACCTGGCAAGGCACCCAAACTCCTCATTTATTCCACAAGTAAT | |
| | | | CTTGCTTCCGGCGTACCTTCTACGTTTAGCGGGTCCGGCTCTGGCACCGATTTC | |
| | | | ACCCTCACTATTAGCTCCTTGCAACCTGAGGACTTTGCTACTTACTATTGTCAG | |
| | | | GTTTATTCCGGTTACCCCCTCACATTCGGTGGAGGAACCAAGGTAGAGATTAAG | |
| | Telisotuzumab | VH | CAGGTCCAGTTGGTACAGTCAGGGGCAGAAGTTAAGAAACCAGGCGCTTCTGTA | 420 |
| | | | AAGGTTAGTTGCAAGGCAAGCGGGTATATATTCACAGCCTATACCATGCATTGG | |
| | | | GTGCGTCAAGCTCCTGGGCAAGGATTGGAGTGGATGGGCTGGATCAAGCCCAAC | |
| | | | AATGGTCTGGCCAACTACGCACAGAAGTTCCAAGGTCGTGTAACCATGACCAGG | |
| | | | GACACTTCAATAAGCACCGCCTACATGGAATTGAGCAGACTTCGATCAGATGAT | |
| | | | ACAGCAGTTTACTATTGCGCTAGGAGTGAAATTACCACAGAGTTTGATTACTGG | |
| | | | GGCCAAGGAACTCTGGTGACTGTTTCCAGT | |
| | | VL | GATATCGTTATGACACAGTCCCCCGACAGCCTGGCTGTCAGTCTCGGGGAGAGA | 421 |
| | | | GCAACTATAAACTGTAAAAGCAGTGAATCCGTCGATTCATACGCAAACAGTTTT | |
| | | | CTGCATTGGTATCAGCAAAAACCCGGCCAGCCACCCAAACTGCTCATATATCGG | |
| | | | GCTAGTACACGTGAGTCAGGCGTACCAGACCGCTTTAGCGGATCAGGAAGTGGG | |
| | | | ACAGACTTTACCTTGACCATTAGCTCACTTCAGGCTGAGGACGTTGCAGTTTAC | |
| | | | TACTGCCAACAAACTAAGGANGACCCACTCACATTCGGCGGAGGAACTAAGGTC | |
| | | | GAGATTAAG | |
| TROP-2 | Datopotamab | VH | CAGGTGCAGTTGGTCCAGTCCGGTGCAGAGGTAAAGATACCAGGCGCTTCCGTT | 422 |
| | | | AAAGTATCCTGTAAAGCTAGCGGTTATACTTTCACTACTGCCGGAATGCAGTGG | |
| | | | GTGCGACAGGCTCCTGGTCAGGGTCTCGAATGGATGGGATGGATCAATAGTCAC | |
| | | | TCAGGAGTGCCAAAGTATGCTGAAGATTTCAAGGGGCGTGTTACTATCTCCGCT | |
| | | | GACACTCCACATCTACTGCTTATCTTCAGCTCTCTAGCCTGAAGTCAGAAGAT | |
| | | VL | GATATACAGATGACCCAATCACCCTCTTCTTTGAGTGCATCAGTAGGTCATCGT | 493 |
| | | | GTTACAATTACCTCTAAACCTAGTCAAGACGTGTCTACTGCTGTCGCCTCGTAT | |
| | | | CAACAGAAACCAGGCAAAGCACCAAAACTTTTGATTTATTCTGCTTCTTATAGA | |
| | | | TATACAGGCGTCCCCAGCCGGTTTTCAGGTTCCGGTTCCGGGACCGACTTTACC | |
| | | | CTCACTATCAGCTCTCTTCAGCCTGAGGACTTCGCCGTTTATTATTGCCAGCAG | |
| | | | CACTATATCACCCACTGACTTTTGGGCAAGGGACTAAGCTGGAGATCAAA | |
| | Sacirazum ab | VH | CAAGTACAGCTTCAGCAATCAGGCTCTGAACTCAAGAAACCTGGTGCCAGCGTG | 424 |
| | | | AAAGTATCCTCTAAGGCATCCCGCTACACTTTTACAKACTATGGAATGAATTGG | |
| | | | GTAAAACAAGCCCCCGGACAAGGGCTTAAATGGATGGCTTGGATATATACTTAC | |
| | | | ACCGGAGAACCTACATATACAGACGACTTTAAAGGGCGATTCGCTTTCTCCCTT | |
| | | | ACCGGAGAACCTACATATACAGACGACTTTAAAGGGCGATTCGCTTTCTCCCTT | |
| | | | GACACAAGTGTAAGCACAGCCTACCTGCAAATCAGCAGTCTCAAAGCCGACGAT | |
| | | | ACAGCCGTGTACTTTTGCGCCAGGGGTCGCTTCGGCTCCACCTATTGGTACTTC | |
| | | | GATGTCTGGGGACAGGGCAGCCTTGTAACTGTATCTAGT | |
| | | VL | GATATTCAGTTGACACAGAGCCCTAGCTCACTTTCAGCCTCTGTGGGTGATAGG | 425 |
| | | | GTTAGTATTACCTGTAAGGCATCCCAAGACGTTAGCATTGCCGTCGCCTGGTAC | |
| | | | CAGCAGAAACCCGGAAAAGCTCCAAAACTGCTCATCTACTCAGCATCCTATCGT | |
| | | | TATACAGCTGTACCTGACAGGTTCTCTGCCTCCGGGAGCGGTACCGATTTTACT | |
| | | | TTGACCATTTCAAGTTTGCAACCAGAAGACTTCGCTGTTTACTACTGCCAGCAG | |
| | | | CATTACATTACTCCACTCACATTCGGAGCAGGGACAAAGGTCGTAATCAAA | |
| DLL3 | Rovalpituzumab | VH | CAAGTCCAGCTTGTTCAAAGTGGGGCTGAAGTGAAGAAACCAGGGGCTAGTGTT | 426 |
| | | | AAAGTGAGCTGTAAGGCATCAGGATACACTTTCACAAACTACGGAATGAATTGG | |
| | | | GTTCGCCAAGCACCTGGTCAAGGCTTGGAATCGATGCGTTGGATTAACACATAT | |
| | | | ACAGGTGAGCCAACTTACCCCGATGATTTCAAGGGGCGAGTTACCATGACTACC | |
| | | | GACACCTCAACATCCACTGCATACATGGAGCTTCGCTCACTCCGAAGCGATGAT | |
| | | | ACTGCAGTTTACTATTGCGCTCCCATCCGTGACTCATCACCTAGCGACTACTGG | |
| | | | GGCCAAGCTACATTGCTAACAGTTTCTTCA | |
| | | VL | GAGATCGTGATGACCCAGAGTCCCCCTACTCTCTCAGTGAGTCCTGGTGAACGT | 427 |
| | | | GCTACACTGTCTTGTAAGGCCAGTCAGTCCGTCTCAAACGATGTCGTTTGGTAT | |
| | | | CAGGAAAAGCCAGGACAAGCCCCCAGACTCCTGATATACTACGCCAGTAATCGC | |
| | | | TATACTCGAATCCCCGCTAGATTCAGTCGGAGTGGAAGCGGAACTGAATTTACC | |
| | | | TTGACTATATCCTCATTGCAAAGCGAAGACTTTGCCGTTTACTATTGTCAACAA | |
| | | | GACTACACCTCTCCTTGGACCTTCGGACAAGGTACAAAACTTGAAATCAAG | |
| | Tarlatamab | VH | CAAGTACAGCTCCAAGAAACTGGCCCCCGATTGGTGAAGCCATCCGAAACACTT | 428 |
| | | | TCCCTTACCTGCACTGTCTCCGGGGGCTCCATCAGTAGTTATTACTGGAGTTGG | |
| | | | ATACGCCAACCACCCGGTAAGTGTCTGGAGTGGATAGGTTATGTGTATTACTCA | |
| | | | GGCACAACCAATTATAATCCATCCTTGAAAAGCCGGGTAACCATCTCAGTAGAT | |
| | | | ACCAGCAAAAACCAGTTCTCCCTGAAACTGTCCAGTGTTACTGCTGCTGATACC | |
| | | | GCCCTATATTATTGTGCATCCATTGCAGTGACAGGGTTTTATTTTGACTATTCG | |
| | | | GGCCAGGGTACTTTGGTAACCGGTATCTTCA | |
| | | VL | GAGATCGTCCTGACCCAAAGCCCAGGTACTCTTTCCCTCAGCCCAGGCGAAAGG | 429 |
| | | | GTCACTCTGTCATGCAGGGCTAGTCAAAGAGTCAACAATAATTACCTCGCATGG | |
| | | | TATCAACAAAGACCCGGACAGGCTCCACGCCTGCTCATATATCGAGCAAGTAGC | |
| | | | CGAGCTACTCGCATTCCCGATAGATTCAGTGGATCTGGATCTGGGACCGATTTT | |
| | | | ACTCTGACAATAAGTCGTCTTGAACCTGAAGATTTTGCAGTATACTATTGTCAG | |
| | | | CAATATGACAGGAGCCCCCTGACATTCGGGTGCGGTACTAAGCTGGAAATCAAA | |
| BCMA | Belantamab | VH | CAAGTCCAACTGGTCCAGTCAGGCGCAGAAGTTAAAAAGCCTGGCAGCAGTGTG | 430 |
| | | | AAGGTGTCTTGTAAGGCAAGCGGCGGTACATTTAGTAATTATTGGATGCACTGG | |
| | | | GTACGGCAGGCTCCCGGCCAAGGGCTTGAATGGATGGGCGCCACATACCGAGGT | |
| | | | CATTCAGACACCTATTACAACCAGAAATTCAAGGGGCGCGTGACCATTACAGCA | |
| | | | GATAAATCAACTTCTACAGCCTACATGGAACTCAGCTCCCTCCGGTATGAGGAT | |
| | | | ACAGCAGTCTACTACTGTGCTCGCGGAGCCATTTACGATGGGTATGATGTGCTG | |
| | | | GATAATTGGGGCAGGGCACACTCGTGAACCGTAAGTAGT | |
| | | VL | GATATACAGATGACCCACTCACCATCCAGCCTTAGTGCATCCGTCGCGGATCGG | 431 |
| | | | GTGACTATTACTTGCTCCGCTTCTCAAGATATTTCAAACTATCTGAATTGGTAT | |
| | | | CAGCAAAAGCCTGGGAAGGCCCCAAAATTGCTGATCTATTACACTTCAAATTTG | |
| | | | CACTCAGGGGTTCCCTCTCGCTTCAGCGGAAGCGGAAGCGGTACTGATTTTACC | |
| | | | TTGACTATCTCTAGCCTCCAGCCAGAGGACTTTGCTACCTACTACTGCCAACAC | |
| | | | TACAGGAAACTCCCATGGACTTTTGGACAAGGCACCAAGCTCGAAATTAAG | |
| LIV-1 | Ladiratuzumab | VH | CAAGTTCAGTTCGTTCAATCTGGGGCCGAAGTCAAAAAACCTGGCGCTTCAGTT | 432 |
| | | | AAAGTTAGCTGCAAAGCAAGCGGTCTCACTATAGAAGACTATTATATGCACTGG | |
| | | | GTCAGACAGGCTCCAGGGCAAGGGCTTGAGTGGATGGGGTGGATAGATCCAGAG | |
| | | | AATGGGGACACCGADTATGCACCCAAATTCCAGGGGCGTGTAACCATGACCCGA | |
| | | | GACACTTCAATAAATACTGCATACATGGAACTCTCCCGGCTCCGGAGCGACGAT | |
| | | | ACAGCCGTGTATTACTGTGCTGTCCACAACGCCCACTACCGCACATCGTTTCCA | |
| | | | TATTGGGGGCAGGGAACTCTTGTTACTGTTTCTTCA | |
| | | VL | GACGTAGTGATGACTCAGTCTCCACTGTCCCTGCCAGTGACATTGCGCCAACCT | 433 |
| | | | GCAAGTATTTCATGCAGATCAAGTCAATCTCTCCTGCACAGTAGCGGCAACACA | |
| | | | TACTTGGAGTGGTATCAACAACGCCCAGGTCAATCACCCAGGCCACTGATATAT | |
| | | | AAAATCTCAACTCGATTCAGCGGTGTTCCCGACAGGTTCTCAGGATCTGGCTCC | |
| | | | GGCACTGATTTTACCTTGAAGATCTCACGAGTGGAAGCTGAGGATGTGGGAGTA | |
| | | | TATTACTGTTTCCAAGCTTCACATGTCCCTTATACTTTTGGTGGAGGAACTAAG | |
| | | | GTAGAGATCAAG | |
| GPC-3 | Codrituzumab | VH | CAGGTGCAACTCGTTCAAAGCGGGGCCGAGGTGAAGATACCAGGGGCCTCAGTT | 434 |
| | | | AAGGTGAGTTGCAAGGCAAGTGGATACACTTTCACCGATTATGAAATGCATTGG | |
| | | | GTGCGTCAGGCCCCAGGACAAGGACTGGAGTGGATGGGCGCTCTCGATCCTAAG | |
| | | | ACTGGTGATACTGCTTACTCTCAAAAGTTCAAAGGCCGAGTCACCTTGACCGCC | |
| | | | GACAAGTCCACATCCACTGCATATATGGAATTGTCAAGTCTGACAAGCGAAGAT | |
| | | | ACAGCCGTCTACTACTGCACCGCCTTTTATAGCTATACATATTGGGGACAGGGG | |
| | | | ACCTTGGTTACTGTGTCATCT | |
| | | VL | GACGTGGTAATGACACAATCACCTTTGTCTCTTCCCGTAACCCCCGGTGAACCA | 435 |
| | | | GCCAGCATCTCATGCAGAAGCAGTCAGTCACTGGTACATTCCAACCGTAATACT | |
| | | | TATCTTCACTGGTACTTCCASAAGCCTGGGCAGTCTCCTCAACTTTTGATATAT | |
| | | | AAAGTGAGCAATCGGTTTAGCGGTGTCCCAGACCGCTTTTCTGGATCTGGAAGT | |
| | | | GGAACAGACTTTACTCTGAAAATAAGCAGAGTCGAGGCAGAAGATGTCGGAGTT | |
| | | | TACTACTGTAGCCAGAACACACACGTACCCCCAACCTTTGGACAGGGCACAAAG | |
| | | | TTGGAAATCAAG | |
| FGFR2 | Apratumab | VH | GAGGTACAACTGCTTGAATCTGGAGGAGGGTTGGTACAACCTGGTGCTTCACTG | 436 |
| | | | CGATTGTCCTGTGCACCCTCAGGCTTTACTTTCTCATCATATGCCATGTCCTGG | |
| | | | GTAAGGCAGGCACCTGGAAAAGGACTCGAATGGGTCTCAGCCATCTCCGGTTCA | |
| | | | GCCACATCAACTTACTATCCAGACTCTGTCAAAGGGCGCTTTACAATATCTAGG | |
| | | | GATAATTCAAAAAATACATTGTACTTGCAGATGAACAGTTTGCGTGCCGAAGAT | |
| | | | ACCGCAGTGTACTATTGCGCTAGGGTTCGATATAACTGGAACCATGGTGACTGG | |
| | | | TTTGACCCTTGGGGCCAAGGCACTGGTGACAGTGAGTTCC | |
| | | VL | CAGTCCGTCCTCACACAACCACCTAGTGCCTCTGGTACACCAGGACAACGTGTC | 437 |
| | | | ACAATTTCCTGCAGCGGGTCAAGTTCAAACATAGGGAATAACTATGTGTCATGG | |
| | | | TATCAACAACTTCCTGGTACTGCTCCAAAGCTCCTCATTTATGAAAACTATAAC | |
| | | | AGGCCCCCAGGTGTCCCAGATCGATTTTCACGATCAAAGTCCGGTACCTCAGCC | |
| | | | AGTTTGGCAATTAGTGGCCTTCGATCCGAAGATGAAGCAGATTACTACTGTTCA | |
| | | | TCCTGGGACGATTCTCTTAACTATTGGGTATTCGGCGGAGCCACTAAACTCACC | |
| | | | GTCCTT | |
| | Bemarituzumab | VH | CAAGTGCAGCTTGTTCAGAGTGGGGCTGAAGTCAAAAAGCCAGGCTCAAGCGTG | 438 |
| | | | AAACTCAGCTGCAAGGCCAGCCGTTACATCTTCACAACTTACAATGTTCACTGC | |
| | | | GTCAGACAAGCCCCTGGTCAGGCGCTTGAGTGGATÄGGATCAATCTACCCCGAT | |
| | | | AATGGGGACACCAGCTATAATCAAAACTTCAAAGGACGTGCAACAATCACAGCC | |
| | | | GACAAGTCAACTTCAACAGCCTACATGGAGCTTTCCAGCTTCCGATCCGAAGAT | |
| | | | ACTGCCGTATATTACTGTGCTAGAGGCGACTTCGCTTATTGGGGACAAGGTACT | |
| | | | TTGGTGACTGTTTCTTCT | |
| | | VL | GACATTCAAATGACCCAATCCCCCAGTTCCTTGAGTGCCTCCGTCGGAGATCGA | 439 |
| | | | GTTAGTATTACATGTAAAGCTAGTCAAGGGGTCAGTAACGACGTTGCTTGGTAC | |
| | | | CAGCAGAAGCCAGGTAAGGCTCCCAAGCTCCTGATATATAGCGCCTCATACCGC | |
| | | | TACACAGGTGTGCCTTCCCGGTTTAGTGGCTCAGGATCAGGGACAGATTTTACA | |
| | | | TTCACTATAAGCTCTTTGCAGCCCGAAGACATAGCCACATATTATTGCCAGCAG | |
| | | | CATTCCACTACTCCATACACATTTGGACAGGGAACAAAGCTGGAGATTAAG | |
| FGFR3 | Vofa [symbol] amab | VH | GAAGTACAGCTTGTCGAGAGCGGTGGCGGGCTTGTACAACCTGGTGGAAGCTTG | 440 |
| | | | CGGTTGAGTTGTGCAGCCAGCGGTTTCACATTTACTAGCACTGGAATATCATGG | |
| | | | GTCCGTCAAGCTCCAGGGAAAGGGCTGGAATGGGTTGGCCGAATATATCCCACC | |
| | | | AGTGGCTCTACCAACTACGCAGACTCAGTCAAGGGTCGCTTTACAATTTCTGCT | |
| | | | GACACAAGTAAGAAGACCGCATATTTGCAGATGAACTCACTGCGAGCCGAGGAT | |
| | | | ACCGCCGTTTACTACTGTGCAAGGACATACGGAATTTACGATCTTTACGTTGAT | |
| | | | TATACAGAGTATGTGATGGATTATTGGGGGCAGGGCACCCTCGTCACTGTGAGT | |
| | | | TCT | |
| | | VL | GACATCCAGATGACCCAGAGCCCCTCTTCTTTGTCAGCAAGCGTCGGAGACCGC | 441 |
| | | | GTTACCATTACTTGCCCTGCCTCTCAGGACGTCGACACCAGCCTTCCTTGCTAC | |
| | | | AAGCAGAAACCAGGAAAAGCCCCCAAGCTGCTCATCTATTCCGCTTCATTTCTC | |
| | | | TACAGCCGAGTGCCATCCCCTTTCTCCGGTTCAGGCTCTGGAACAGACTTCACT | |
| | | | CTGACTATAAGCAGTCTTCAACCCGAAGACTTCGCTACATACTATTGTCAGCAA | |
| | | | TCAACCGGACACCCACAGACATTCGGCCAGGGCACTAAAGTAGAGATTAAA | |
| VEGFR2 | Ramucirumab | VH | GAAGTTCAGCTTGTGCAGAGTGGCGGAGGGCTTGTGAAACCAGGAGGATCACTG | 442 |
| | | | AGGCTCTCCTGTGCAGCATCCGGTTTCACATTCAGCAGCTATAGTATGAACTGG | |
| | | | GTGCGTCAGGCTCCAGGGAAGGGACTGGAATGGGTCTCAAGCATTTCCTCCTCC | |
| | | | TCTTCATATATATATTACGCCGACAGTGTAAAAGGCGGCTTTACAATATCTCGG | |
| | | | GATAACGCTAAAAATAGCTTGTACCTTCAGATGAATTCACTGAGGGCTGAGGAC | |
| | | | ACTGCTGTGTACTACTGTGCAAGAGTCACCGACGCTTTTGATATTTGGGGTCAG | |
| | | | GGGACAATGGTGACCGTCTCCTCA | |
| | | VL | GATATACAAATGACCCAGTCTGGGAGTTCAGTATCCGCCAGCATAGGTGACCGC | 443 |
| | | | GTGACCATAACATGCCGGGCCAGCCAGGGAATTGATAATTGGTTGGGGTGGTAT | |
| | | | CAACAAAAGCCCGGAAAAGCTCCCAAGCTCCTTATCTATGATGCTTCTAACTTG | |
| | | | GATACAGGTGTACCCAGTCGATTTAGTGGCTCCGGGAGTGGGACTTATTTCACC | |
| | | | CTCACTATATCTTCTCTGCAAGCAGAAGACTTTGCAGTATATTTCTGTCAACAG | |
| | | | GCCAAAGCATTCCCTCCAACCTTCGCTGGGGGGACAAAGGTAGACATTAAA | |
| CD20 | Rituximab | VH | CAGGTCCAGCTCCAACAACCTGGAGCAGAATTGGTCAAGCCAGGGGCAAGCGTG | 444 |
| | | | AAGATGAGCTGCAAGGCAAGCGCCTATACTTTCACCTCCTACAATATGCATTGG | |
| | | | GTCAAACAAACTCCAGGTCGTGGGCTTGAGTGGATCGGGGCCATTTACCCAGGC | |
| | | | AACGCCGACACCTCATATAACCAAAAGTTTAAGGGAAAAGCCACTTTGACAGCA | |
| | | | GATAAAAGTAGTAGCACTCCATACATGCAACTGTCAAGTCTGACTAGCGAAGAT | |
| | | | AGTGCCGTATATTATTGCGCTAGGTCCACATATTACGCCGCTGATTGGTACTTC | |
| | | | AATGTTTGGGGAGCCGGGACTACAGTCACCGTATCCGCT | |
| | | VL | CAAATCGTCCTGTCTCAATCACCAGCAATTCTGAGTCCTAGTCCCGGAGAAAAA | 445 |
| | | | GTCACTATGACCTGTAGAGCCTCATCATCTGTTTCCTATATACATTGGTTTCAG | |
| | | | CAGAAACCTGGATCTTCTCCCAAGCCCTGGATTTATCCAACCTCTAACCTCGCA | |
| | | | AGTGGAGTCCCCGTGCGGTTTTCAGGCAGCGGTTCCGGTACAAGTTATTCCCTG | |
| | | | ACCATCAGCCGTGTGGAAGCAGAAGACGCCGCCACATACTACTGCCAACAGTGG | |
| | | | ACCTCARATCCTCCCACCTTTGGGGGAGGTACTAAACTTGAAATAAAA | |
| | Obinutuzumab | VH | CAAGTGCAACTGGTTCAAAGTGGAGCCGAGGTCAAAAAACCTGGTTCCTCCGTC | 446 |
| | | | AAAGTGTCTTGTAAAGCTTCAGGGTACGCATTCTCCTACTCCTCGATAAACTGG | |
| | | | GTGCGTCAGCCTCCTGGGCAAGCTCTGGAATGGATGGGCCGGATTTTCCCAGGA | |
| | | | GATGGCGACACAGACTACAATGGGAAGTTTAAGCGTCGGGTAACCATCACCGCT | |
| | | | GACAAGAGTACATCTACCCCCTATATGGAGCTTTCTTCACTTAGGACTGAGGAC | |
| | | | ACAGCAGTCTACTATTGTGCTCGAAATGTGTTTGACCGGTATTGCCTGGTGTAT | |
| | | | TGGGGCCAGGGTACCCTCGTAACACTATCATCA | |
| | | VL | GATATTGTTATGACACAAACACCACTGTCCCTCCCTGTTACACCCGGAGAGCCT | 447 |
| | | | GCTTCCATAAGTTGTCGATCCTCCAAATCACTTCTCCACTCAAATGGAATCACT | |
| | | | TATCTTTATTGGTATCTTCAGAAGCCAGGACAGTCCCCTCAACTGTTGATTTAT | |
| | | | CAGATGTCAAATTTGGTGAGTGGGGTGCCAGATAGGTTTTCTGGATCCGGTTCC | |
| | | | GGTACTGACTTTACATTGAAAATATCCCGAGTCGAAGCCGAAGACGTGGGCGTG | |
| | | | TACTATTGCGCTCAGAACCTTGAGCTGCCTTACACCTTTGGCGGTGGGACTAAA | |
| | | | GTGGAAATTAAG | |
| CD38 | Daratumumab | VH | GAGGTTCAGTTGCTGGAGAGCGGAGGGGGGCTTGTCCAACCAGGCGGTTCTCTG | 448 |
| | | | CGACTTTCTTGTGCAGTGTCTGGGTTTACCTTCAACAGCTTTGCCATGTCCTGG | |
| | | | GTGCGCCAAGCACCCGGAAAGGGACTGGAGTGGGTTAGCGCAATCTCTGGGTCA | |
| | | | GGGGGAGGGACTTATTATGCTGACTCTGTTAAGGGTAGATTTACAATCAGTCGC | |
| | | | GATAATAGTAAAAATACACTGTATCTTCAGATGAACTCTCTCAGAGCCGAGGAT | |
| | | | ACAGCCGTGTATTTCTGTGCCAAAGACAAGATCCTTTGGTTCGGAGAGCCTGTT | |
| | | | TTCGACTATTGGGGTCAAGGGACATTGGTGACAGTAAGCTCT | |
| | | VL | GAAATTGTTCTCACCCAGAGTCCAGCTACCCTGTCCCTGAGCCCCGGCGAGAGA | 449 |
| | | | GCAACCTTGAGTTGCCGAGCCTCTCAATCCGTCTCCTCCTATCTGGCCTGGTAC | |
| | | | CAACAAAAACCAGGCCAACCCCCCCGTTTGCTGATATACGACGCCAGTAACCGA | |
| | | | GCTACCGGCATACCCGCCCGCTTTAGCGGCTCTGGATCTGGTACAGATTTCACA | |
| | | | CTCACTATATCAAGTCTGGAACCTGAAGATTTCGCAGTCTATTATTGCCAACAA | |
| | | | CGGTCAAATTGGCCCCCTACATTTGGACAAGGGACCAAAGTGGAGATTAAG | |
| EphA2 | 1C1 | VH | GAGGTACAGTTGCTGGAGTCAGGAGGTGGATTGGTCCAACCCGGAGGATCTCTT | 450 |
| | | | CGTCTGTCCTGCGCCGCCTCAGGATTTACCTTCTCTCATTATATGATGGCATGG | |
| | | | GTACGTCAGGCTCCAGGCAAAGGTCTGGAATGGGTTAGTCGGATTGGTCCCTCA | |
| | | | GGGCGTCCTACCCATTATGCCGATTCTGTAAAGGGCCGTTTTACCATAAGCAGA | |
| | | | GACAACTCTAAGAACACCCTTTACCTTCAGATGAATAGCCTGAGGGCTGAGGAT | |
| | | | ACCGCAGTGTATTACTGCGCAGGCTATGACTCTCGGTACGACTATGTCGCCGTA | |
| | | | GCAGGACCTGCCGAGTATTTTCAACACTGGGGACAGGGGACCCTTGTCACAGTT | |
| | | | TCTAGT | |
| | | VL | GATATTCAAATGACACHAAGCCCAAGTTCCTTGTCCGCCTCAGTTGGTGATCGT | 451 |
| | | | GTGACAATAACCTGTCGGGCTTCACAATCCATATCTACATGGCTGGCTTGGTAC | |
| | | | CAGCAAAAGCCAGGTAAAGCCCCAAAACTCCTGATTTACAAGGCAAGTAACTTG | |
| | | | CATACTGGGCTACCCAGCCGTTTCTCTGCGTCACGCTCTCGGACAGAGTTTAGT | |
| | | | CTTACAATTTCTGGTCTGCAACCCGATGACTTCGCTACCTATTACTATCAACAA | |
| | | | TATAATAGTTATTCTCGAACATTTGGTCAGGGAACAAAAGTGGAAATCHAA | |

[symbol]

indicates data missing or illegible when filed

### Fc Region or Fragment Thereof

[0215] Here, the above-described first Fc domain and the second Fc domain may each be an Fc region of an immunoglobulin. The Fc region of an immunoglobulin may be an Fc domain variant as well as a wild type Fc domain. Here, the Fc region may be an Fc region of IgG, IgA, IgE, IgD), or IgM.

[0216] As used herein, the term “Fc domain variant” may refer to a form which is different from the wild type Fc domain in terms of glycosylation pattern, has a high level of specific glycan species as compared with the wild type Fc domain, a low level of specific glycan species as compared with the wild type Fc domain, or a deglycosylated form. In addition, an aglycosylated Fc domain is included therein. The Fc domain or a variant thereof may be adapted to have an adjusted number of sialic acids, fucosylations, or other types of glycosylations, through modulation of culture conditions or genetic manipulation of a host cell.

[0217] In addition, glycosylation of the Fc domain of an immunoglobulin may be modified by conventional methods such as chemical methods, enzymatic methods, and genetic engineering methods using microorganisms. In addition, the Fc domain variant may be in a mixed form of respective Fc regions of immunoglobulin IgG, IgA, IgE, IgD, or IgM. In addition, the Fc domain variant may be a form in which some amino acids of the Fc domain are substituted with other amino acids.

[0218] An “amino acid” introduced by the substitution and/or addition may be any one selected from the group consisting of lysine (K), alanine (A), arginine (R), asparagine (N), aspartic acid (D), cysteine (C), glutamine (Q), glutamic acid (E), glycine (G), histidine (H), isoleucine (I), leucine (L), methionine (M), phenylalanine (F), proline (P), serine (S), threonine (T), tryptophan (W), tyrosine (Y), and valine (V).

[0219] In one embodiment, the variant of the Fc region may be a form in which amino acids 239 and/or 332 of the CH2 region are substituted with other amino acids (see Kabat numbering system). Specifically, S239 may be substituted with an amino acid other than S, and specifically, S239 may be substituted with S239D. In addition, 1332 may be substituted with an amino acid other than I, and specifically, I332 may be substituted with I332E.

[0220] In addition, the Fc region may include a variant or structure of a knob, or a variant or structure of a hole.

[0221] As used herein, the term “knob-into-hole” refers to an Fc heterodimerization strategy for producing antibodies that specifically bind to different regions, such as bispecific antibodies, multispecific antibodies, or heterodimeric antibodies. Generally, this technique involves introducing a knob mutation at the interface of a first polypeptide (e.g., the first CH3 domain of a first antibody heavy chain) and a corresponding hole mutation at the interface of a second polypeptide (e.g., the second CH3 domain of a second antibody heavy chain), such that a knob may be placed within the hole to promote heterodimer formation and prevent homodimer formation.

[0222] The ‘knob’ variant is constructed by replacing small amino acid side chains from the interface of the first polypeptide (e.g., the first CH3 domain of the first antibody heavy chain) with larger side chains (e.g., arginine, phenylalanine, tyrosine, or tryptophan). The complementary ‘hole’ variant of the same or similar size to the knob is created by replacing large amino acid side chains at the interface of the second polypeptide (e.g., the second CH3 domain of the second antibody heavy chain) with smaller side chains (e.g., alanine, serine, valine, or threonine). The knob and hole may be created by altering the nucleic acid encoding the polypeptide, for example, by site-directed mutagenesis, or by peptide synthesis.

[0223] Examples of variants of the Fc region that promote the formation of a heterodimer may include those described in WO2014084607A1 and WO2018059502A1, etc. The disclosures of WO2014084607A1 and WO2018059502A1 are incorporated herein by reference. WO2014084607A1 describes, for example, mutations in the CH3 domain that may comprise (a-1) tryptophan (W) substituted at Lys409 of one CH3 domain that interacts with valine (V) substituted at Asp399 and threonine (T) substituted at Phe405 of another CH3 domain; and (a-2) serine (S) substituted at Tyr349 of one CH3 domain that interacts with tryptophan (W) substituted at Glu357 of another CH3 domain, and in addition, may further comprise (b-1) glutamic acid (E) substituted at Lys360 of one CH3 domain that interacts with arginine (R) substituted at Gln347 of another CH3 domain; and (b-2) glutamic acid (E) substituted at Gln347 and glutamic acid substituted at Lys360 of one CH3 domain that interact with arginine (R) substituted at Gln347 of another CH3 domain. Here, the position of the amino acid residue follows the EU index. WO2018059502A1, for example, describes mutations in the Fc domain including one or more mutations selected from a)-e), respectively: a) L351G, L351Y, L351V, L351P, L351D, L351E, L351K, or L351W; b) T366L, T366P, T366W, or T366V; c) D399C, D399N, D399I, D399G, D399R, D399T, or D399A; d) Y407L, Y407A, Y407P, Y407F, Y407T, or Y407H; and e) K409C, K409P, K409S, K409F, K409V, K409Q, or K409R. Here, the position of the amino acid residue follows the EU index.

### Structure of Fusion Protein

[0224] The fusion protein may comprise polypeptide chains represented by the following structural formulas (I), (II), (III), and (IV), respectively:

N′—X-(L1)n-A-C′ (I);

N′—Y-(L2)m-B—C′ (II);

N′—C—C′ (III); and

N′-D—C′ (IV)
[0225] wherein, in the structural formulas (I), (II), (III), and (IV),
[0226] N′ is the N-terminus of each polypeptide,
[0227] C′ is the C-terminus of each polypeptide,
   [0228] refers to a linkage,
[0229] A, B, C, and D are monomeric polypeptide sequences of an Fc domain each comprising the CH2 and CH3 regions of an immunoglobulin, and optionally further comprising CH4 and/or a hinge sequence, wherein
[0230] A forms a dimer with one of C or D to form the first Fc domain (b), and
[0231] B forms a dimer with the remaining one of C or D to form the second Fc domain (c);
[0232] L1 and L2 are each peptide linker,
[0233] n and m are each independently 0 or 1,
[0234] X comprises a heavy chain variable region or a light chain variable region of an antibody that specifically binds to an antigen;
[0235] Y comprises a light chain variable region or a heavy chain variable region of an antibody that specifically binds to an antigen; and
[0236] X and Y pair with each other to form the antigen-binding site (a) that specifically binds to an antigen, and
[0237] the polypeptides of (I), (II), (III), and (IV) may be assembled into a fusion protein comprising one antigen-binding site and two Fc domains.

[0238] Specifically, X is a first polypeptide sequence of the antigen-binding site, which comprises heavy chain CDR1, CDR2, and CDR3 sequences of an antibody that specifically binds to a first antigen, or a heavy chain variable region of an antibody that specifically binds to a first antigen; Y is a second polypeptide sequence of the antigen-binding site, which comprises light chain CDR1, CDR2, and CDR3 sequences of an antibody that specifically binds to a first antigen, or a light chain variable region of an antibody that specifically binds to a first antigen; and X and Y pair with each other to form the antigen-binding site (a) that specifically binds to an antigen.

[0239] According to one embodiment, the CH3 region may be mutated to minimize the interaction between A and B, and between C and D and promote the formation of a heterodimeric Fc between A and C, and between B and D. Specifically, the Fc domain monomer comprises a knob variant or a hole variant that promotes the formation of an Fc heterodimer (heterodimeric Fc); or the Fc domain monomer may comprise a variant that promotes the formation of a heterodimer by electrostatic steering mechanism.

[0240] According to one embodiment, X in the structural formula (I) may further comprise a heavy chain CH1 region, and/or Y in the structural formula (II) may further comprise a light chain constant region.

[0241] In addition, the fusion protein may comprise polypeptide chains represented by the following structural formulas (I′), (II′), (III), and (IV):

N′—VD1-(L3)p-X-(L1)n-A-C′ (I′);

N′—VD2-(L4)q-Y-(L2)m-B—C′ (II′);

N′—C—C′ (III); and

N′-D-C′ (IV)
[0242] wherein, in the structural formulas (I′), (II′), (III), and (IV),
[0243] N′ is the N-terminus of the polypeptide chain,
[0244] C′ is the C-terminus of the polypeptide chain,
   [0245] refers to a linkage,
[0246] A, B, C, and D are monomeric polypeptide sequences of an Fc domain each comprising the CH2 and CH3 regions of an immunoglobulin, and optionally further comprising CH4 and/or a hinge sequence, wherein A forms a dimer with one of C or D to form the first Fc domain (b), and B forms a dimer with the remaining one of C or D to form the second Fc domain (c);
[0247] L1, L2, L3, and L4 are each peptide linker,
[0248] n, m, p, and q are each independently 0 or 1,
[0249] VD1 consists of a heavy chain or light chain variable region of an antibody that specifically binds to an antigen, or CDR1, CDR2, and CDR3 of an antibody heavy chain or light chain;
[0250] VD2 consists of a light chain or heavy chain variable region of an antibody that specifically binds to an antigen, or CDR1, CDR2, and CDR3 of an antibody heavy chain or light chain;
[0251] VD1 and VD2 pair with each other to form a second antibody variable region that specifically binds to a second antigen,
[0252] X comprises a heavy chain or light chain variable region of an antibody that specifically binds to an antigen, or CDR1, CDR2, and CDR3 of an antibody heavy chain or light chain;
[0253] Y comprises a light chain or heavy chain variable region of an antibody that specifically binds to an antigen, or CDR1, CDR2, and CDR3 of an antibody heavy chain or light chain; and
[0254] X and Y pair with each other to form a first antibody variable region that specifically binds to a first antigen, and
[0255] VD1-(L3)p-X forms a first polypeptide sequence of the antigen-binding site (a), and VD2-(L4)q-Y forms a second polypeptide sequence of the antigen-binding site (a).

[0256] According to one embodiment, the CH3 region may be mutated to minimize the interaction between A and B, and between C and D and promote the formation of a heterodimeric Fc between A and C, and between B and D. Specifically, the Fc domain monomer comprises a knob variant or a hole variant that promotes the formation of an Fc heterodimer (heterodimeric Fc); or the Fc domain monomer may comprise a variant that promotes the formation of a heterodimer by electrostatic steering mechanism.

[0257] According to one embodiment, the heavy chain variable region may further comprise a heavy chain CH1 region. In addition, the light chain variable region may further comprise a light chain constant region.

[0258] In the structures of the fusion proteins described herein, the binding between X and Y may be achieved i) through a disulfide bond formed by Cys present in CH1 and a light chain constant region, ii) through a disulfide bond formed by Cys present in a heavy chain variable region and a light chain variable region, or iii) through a disulfide bond formed by Cys present in CH1 and a light chain constant region, and a disulfide bond formed by Cys present in a heavy chain variable region and a light chain variable region.

[0259] Specifically, the binding between X and Y may be formed by a disulfide bond present between CH₁233 and CL214 based on Kabat numbering system. In addition, X and Y may further comprise Cys through amino acid substitution. Examples of such variants may include mutations in the variable region, and specifically may include mutations at 105C of VH and 43C of VL, or mutations at 44C of VH and 100C of VL based on Kabat numbering system. In one embodiment, the mutation may be Q105C of VH and A43C of VL. In addition, in one embodiment, the mutation may be G44C of VH and Q100C of VL. In addition, examples of variants in the constant region may include mutations at 122C of CH1 and 121C of CL based on Kabat numbering system. In one embodiment, the mutation may be F122C of CH1 and S121C of CL.

### Linker and Hinge

[0260] The hinge is a hinge region derived from immunoglobulins. In one embodiment, the antibody hinge region is an IgG hinge region. The IgG hinge region provided herein may be selected, for example, from antibody hinge regions of various IgG subtypes. The table below lists exemplary IgG subtypes with core hinge sequences that may be included in the flexible peptide regions provided herein. In addition, at least one Cys may exist within the hinge. Specifically, 1, 2, or 3 Cys may exist within the hinge.

TABLE 5

| IgG | | SEQ |
|---|---|---|
| subtype | Sequence of core hinge | ID NO |
| IgG1 | EPKSCDKTHTCPPCP | 828 |
| IgG2 | ERKCCVECPPCP | 829 |
| IgG3 | ELKTPLDTTHTCPRCP(EPKSCDTPPPCPRCP)3 | 830 |
| IgG4 | ESKYGPPCPSCP | 831 |

[0261] The hinge may be modified to delete disulfide bonds or introduce additional disulfide bonds.

[0262] In addition, the linkers L1 and L2 may each comprise 1 to about 70 amino acids. According to one exemplary embodiment, L1 and L2 may each comprise about 5 to about 60 amino acids, about 10 to about 50 amino acids, about 15 to about 40 amino acids, or about 20 to about 30 amino acids. According to another exemplary embodiment, for example, L1 and L2 may each be a peptide consisting of 1-70 amino acid residues, 2-60 amino acid residues, 2-50 amino acid residues, 2-40 amino acid residues, 2-30 amino acid residues, 3-50 amino acid residues, 3-40 amino acid residues, 3-30 amino acid residues, 2-28 amino acid residues, 2-26 amino acid residues, 2-24 amino acid residues, 2-22 amino acid residues, 2-20 amino acid residues, 2-18 amino acid residues, 2-16 amino acid residues, 2-14 amino acid residues, 2-12 amino acid residues, or 2-10 amino acid residues. Specifically, L1 and L2 may include the amino acid sequence of (G4S)o (where o is an integer of 1 to 5) in Table 6 below, but are not limited thereto. In addition, L1 and L2 may have different amino acid sequences. In addition, here, L1 and L2 may comprise at least one Cys. In addition, a disulfide bond may be formed through Cys present in L1 and L2.

TABLE 6

| Sequence of linker | SEQ ID NO |
|---|---|
| GGGGS | 832 |
| GGGGSGGGGS | 833 |
| GGGGSGGGGSGGGGS | 6 |

[0263] In addition, the linkers L3 and L4 may each comprise 1 to about 30 amino acids. According to one exemplary embodiment, L3 and L4 may each comprise about 5 to about 25 amino acids, about 10 to about 20 amino acids, or about 15 amino acids. According to another exemplary embodiment, L3 and L4 may each be a peptide consisting of 2-30 amino acid residues, 2-25 amino acid residues, 2-20 amino acid residues, 2-15 amino acid residues, 3-30 amino acid residues, 2-28 amino acid residues, 2-26 amino acid residues, 2-24 amino acid residues, 2-22 amino acid residues, 2-20 amino acid residues, 2-18 amino acid residues, 2-16 amino acid residues, 2-14 amino acid residues, 2-12 amino acid residues, or 2-10 amino acid residues. Specifically, L3 and L4 may include the amino acid sequence of (G4S)o (where o is an integer of 1 to 5) in Table 6 above, but are not limited thereto. In addition, L3 and L4 may have different amino acid sequences.

### Specific Examples of Fusion Proteins

### Fusion Protein Comprising One Antigen-Binding Site and Two Fcs

i) Fusion Protein in which Antigen-Binding Site is Fab

[0264] As shown in FIG. 2a, the fusion protein comprises polypeptides of the structural formulas (I), (II), (III), and (IV), where X is a heavy chain variable region and further comprises CH1, and Y is a light chain variable region and comprises a light chain constant region. In addition, they are attached to each other by Cys in the CH1 structure and the light chain variable region to form a Fab structure. Here, n is 0, CH1 is directly linked to the hinge, m is 1, and L2 includes a peptide linker. Here, A and C are attached to each other to form the first Fc domain, and B and D are attached to each other to form the second Fc domain. In addition, the CH3 region of A comprises a hole variant, and the CH3 region of C comprises a knob variant. In addition, the CH3 region of B comprises a hole variant, and the CH3 region of D comprises a knob variant. In addition, the antigen-binding site, antigen, hinge, linker, and Fc are as described above.

[0265] As shown in FIG. 2b, the fusion protein comprises polypeptides of the structural formulas (I), (II), (III), and (IV), where X is a heavy chain variable region and further comprises CH1, and Y is a light chain variable region and comprises a light chain constant region. In addition, they are attached to each other by Cys in the CH1 structure and the light chain variable region to form a Fab structure. Here, n is 0, CH1 is directly linked to the hinge, m is 1, and L2 includes a peptide linker. Here, A and C are attached to each other to form the first Fc domain, and B and D are attached to each other to form the second Fc domain. In addition, the CH3 region of A comprises a hole variant, and the CH3 region of C comprises a knob variant. In addition, the CH3 region of B comprises a hole variant, and the CH3 region of D comprises a knob variant. In addition, X comprises the mutation of 105C, and Y comprises the mutation of 43C, and a disulfide bond between Cys is formed. In addition, the antigen-binding site, antigen, hinge, linker, and Fc are as described above.

[0266] As shown in FIG. 2c, the fusion protein comprises polypeptides of the structural formulas (I), (II), (III), and (IV), where X is a heavy chain variable region and further comprises CH1, and Y is a light chain variable region and comprises a light chain constant region. In addition, they are attached to each other by Cys in the CH1 structure and the light chain variable region to form a Fab structure. Here, n is 0, CH1 is directly linked to the hinge, m is 1, and L2 includes a peptide linker. Here, A and C are attached to each other to form the first Fc domain, and B and D are attached to each other to form the second Fc domain. In addition, the CH3 region of A comprises a hole variant, and the CH3 region of C comprises a knob variant. In addition, the CH3 region of B comprises a hole variant, and the CH3 region of D comprises a knob variant. In addition, CH1 comprises the mutation of 122C, and the light chain constant region comprises the mutation of 121C, and a disulfide bond between Cys is formed. In addition, the antigen-binding site, antigen, hinge, linker, and Fc are as described above.

[0267] As shown in FIG. 2d, the fusion protein comprises polypeptides of the structural formulas (I), (II), (III), and (IV), where X is a heavy chain variable region and further comprises CH1, and Y is a light chain variable region and comprises a light chain constant region. In addition, they are attached to each other by Cys in the CH1 structure and the light chain variable region to form a Fab structure. Here, n is 0, CH1 is directly linked to the hinge, m is 1, and L2 includes a peptide linker. Here, A and C are attached to each other to form the first Fc domain, and B and D are attached to each other to form the second Fc domain. In addition, the CH3 region of A comprises a hole variant, and the CH3 region of C comprises a knob variant. In addition, the CH3 region of B comprises a hole variant, and the CH3 region of D comprises a knob variant. In addition, X comprises the mutation of 44C, and Y comprises the mutation of 100C, and a disulfide bond between Cys is formed. In addition, the antigen-binding site, antigen, hinge, linker, and Fc are as described above.

[0268] As shown in FIGS. 6a to 6d, the fusion protein comprises polypeptides of the structural formulas (I), (II), (III), and (IV), where X is a heavy chain variable region and further comprises CH1, and Y is a light chain variable region and comprises a light chain constant region. In addition, they are attached to each other by Cys in the CH1 structure and the light chain variable region to form a Fab structure. Here, n is 0, and CH1 is directly linked to the hinge. Here, A and C are attached to each other to form the first Fc domain, and B and D are attached to each other to form the second Fc domain. In addition, the CH3 region of A comprises a hole variant, and the CH3 region of C comprises a knob variant. In addition, the CH3 region of B comprises a hole variant, and the CH3 region of D comprises a knob variant. In addition, X comprises the mutation of 44C, and Y comprises the mutation of 100C, and a disulfide bond between Cys is formed. Here, m is 0, and the light chain variable region may be directly linked to the hinge (FIG. 6d). In addition, m is 1, and L2 may include a 15-mer peptide linker (FIG. 6a), a 10-mer peptide linker (FIG. 6b), or a 5-mer peptide linker (FIG. 6c). In addition, the antigen-binding site, antigen, hinge, linker, and Fc are as described above.

[0269] As shown in FIG. 19a, the fusion protein comprises polypeptides of the structural formulas (I), (II), (III), and (IV), where X is a heavy chain variable region and further comprises CH1, and Y is a light chain variable region and comprises a light chain constant region. In addition, they are attached to each other by Cys in the CH1 structure and the light chain variable region to form a Fab structure. Here, n is 0, CH1 is directly linked to the hinge, m is 1, and L2 includes a peptide linker. Here, A and C are attached to each other to form the first Fc domain, and B and D are attached to each other to form the second Fc domain. In addition, the CH3 region of A comprises a hole variant, and the CH3 region of C comprises a knob variant. In addition, the CH3 region of B comprises a hole variant, and the CH3 region of D comprises a knob variant. In addition, X comprises the mutation of 44C, and Y comprises the mutation of 100C, and a disulfide bond between Cys is formed. Here, all CH2s of A, B, C, and D comprise the 239D and 332E mutations. In addition, the antigen-binding site, antigen, hinge, linker, and Fc are as described above.

ii) Fusion Protein in which Antigen-Binding Site is Fv

[0270] As shown in FIG. 10, the fusion protein comprises polypeptides of the structural formulas (I), (II), (III), and (IV), where X and Y are attached to each other by at least one Cys present therein to form a Fv structure. Here, A and C are attached to each other to form the first Fc domain, and B and D are attached to each other to form the second Fc domain. In addition, the CH3 region of A comprises a hole variant, and the CH3 region of C comprises a knob variant. In addition, the CH3 region of B comprises a hole variant, and the CH3 region of D comprises a knob variant. X may comprise the mutations of 44C, 105C, 122C, 44C/105C, 44C/122C, 105C/126C or 44C/105C/126C, and Y may comprise the mutations of 100C, 43C, 121C, 100C/43C, 100C/121C, 43C/121C, or 100C/43C/121C. In addition, a disulfide bond may be formed by Cys present in L1 and L2. In addition, the antigen-binding site, antigen, hinge, linker, and Fc are as described above.

### Fusion Protein Comprising Two Antigen-Binding Sites and Two Fcs

iii) Fusion Protein in which Antigen-Binding Site is Fab

[0271] As shown in FIG. 25, the fusion protein comprises polypeptides of the structural formulas (I′), (II′), (III), and (IV), where X is a heavy chain variable region and further comprises CH1, and Y is a light chain variable region and comprises a light chain constant region. In addition, they are attached to each other by Cys in the CH1 structure and the light chain variable region to form a Fab structure. Here, n is 0, CH1 is directly linked to the hinge, m is 1, and L2 includes a peptide linker. Here, A and C are attached to each other to form the first Fc domain, and B and D are attached to each other to form the second Fc domain. In addition, the CH3 region of A comprises a hole variant, and the CH3 region of C comprises a knob variant. In addition, the CH3 region of B comprises a hole variant, and the CH3 region of D comprises a knob variant. In addition, VD1 in the structural formula (I′) is a heavy chain variable region, and VD2 in the structural formula (II′) is a light chain variable region, and VD1 and VD2 pair with each other to form Fv. In addition, p and q are each 1, and L3 and L4 are peptide linkers. As a non-limiting example, X and Y may pair with each other to form the variable region of pertuzumab, and VD1 and VD2 may pair with each other to form the variable region of trastuzumab. In addition, the antigen-binding site, antigen, hinge, linker, and Fc are as described above.

[0272] As shown in FIG. 26, the peptide linkers of L3 and L4 in the structural formulas (I′) and (II′) may be of various lengths. In addition, the first antigen-binding site formed by pairing between X and Y, and the second antigen-binding site formed by pairing between VD1 and VD2 may be the same or different. In addition, L1 and L2 may also comprise various peptide linkers.

### Use of Fusion Protein

[0273] In another aspect of the present invention, there is provided a pharmaceutical composition for preventing or treating cancer, comprising the fusion protein as an active ingredient.

[0274] Here, cancer may be any one selected from the group consisting of gastric cancer, liver cancer, lung cancer, large intestine cancer, breast cancer, prostate cancer, skin cancer, bone cancer, multiple myeloma, glioma, ovarian cancer, pancreatic cancer, cervical cancer, thyroid cancer, laryngeal cancer, acute myeloid leukemia, chronic myeloid leukemia, acute lymphoblastic leukemia, chronic lymphoblastic leukemia, brain tumor, neuroblastoma, retinoblastoma, head and neck cancer, salivary gland cancer, and lymphoma.

### Polynucleotide Encoding Fusion Protein

[0275] In another aspect of the present invention, there is provided a polynucleotide encoding a polypeptide of the structural formula (I), (II), (III), and/or (IV).

[0276] In another aspect of the present invention, there is provided a polynucleotide encoding a polypeptide of the structural formula (I′), (II′), (III), and/or (IV).

[0277] The polynucleotide may further comprise a nucleic acid encoding a signal sequence or a leader sequence. As used herein, the term “signal sequence” refers to a signal peptide that directs secretion of a target protein. The signal peptide is translated and then cleaved in a host cell. Specifically, the signal sequence is an amino acid sequence that initiates migration of a protein across the endoplasmic reticulum (ER) membrane.

[0278] The signal sequences are well known in the art for their characteristics. Such signal sequences typically comprise 16 to 30 amino acid residues, and may comprise more or fewer amino acid residues than such amino acid residues. A typical signal peptide consists of three regions, that is, a N-terminal region, a central hydrophobic region, and a more polar C-terminal region. The central hydrophobic region comprises 4 to 12 hydrophobic residues that cause the signal sequence to be immobilized during migration of an immature polypeptide through the membrane lipid bilayer.

[0279] After initiation, signal sequences are cleaved in the lumen of ER by cellular enzymes, commonly known as signal peptidases. Here, the signal sequence may be a secretory signal sequence of tPa (tissue plasminogen activator), HSV gDs (signal sequence of Herpes simplex virus glycoprotein D), or a growth hormone. Preferably, a secretory signal sequence used in higher eukaryotic cells including mammals and the like may be used. In addition, as the signal sequence, a wild type signal sequence may be used, or a signal sequence that has been substituted with a codon having high expression frequency in a host cell may be used.

Vector Loaded with Polynucleotide

[0280] In another aspect of the present invention, there is provided a vector comprising the polynucleotide. The vector may comprise a polynucleotide encoding a polypeptide of the structural formula (I), (II), (III), and/or (IV). In addition, the vector may comprise a polynucleotide encoding a polypeptide of the structural formula (I′), (II′), (III), and/or (IV).

[0281] The vector may be introduced into a host cell to be recombined with and inserted into the genome of the host cell. Alternatively, the vector is understood as nucleic acid means comprising a polynucleotide sequence which is autonomously replicable as an episome. The vectors include linear nucleic acids, plasmids, phagemids, cosmids, RNA vectors, viral vectors, and analogs thereof. Examples of the viral vector include, but are not limited to, retroviruses, adenoviruses, and adeno-associated viruses.

[0282] Specifically, the vector may include plasmid DNA, phage DNA, and the like; and commercially developed plasmids (pUC18, pBAD, pIDTSAMRT-AMP, and the like), E. coli-derived plasmids (pYG601BR322, pBR325, pUC118, pUC119, and the like), Bacillus subtilis-derived plasmids (pUB110, pTP5, and the like), yeast-derived plasmids (YEp13, YEp24, YCp50, and the like), phage DNA (Charon4A, Charon21A, EMBL3, EMBL4, λgt10, λgt11, λZAP, and the like), animal viral vectors (retroviruses, adenoviruses, vaccinia viruses, and the like), insect viral vectors (baculoviruses and the like). Since the vector exhibits different expression levels and modification of a protein depending on a host cell, it is preferred to select and use a host cell which is most suitable for the purpose.

[0283] As used herein, the term “gene expression” or “expression” of a target protein is understood to mean transcription of DNA sequences, translation of mRNA transcripts, and secretion of fusion protein products or fragments thereof. A useful expression vector may be RcCMV (Invitrogen, Carlsbad) or a variant thereof. The expression vector may comprise human cytomegalovirus (CMV) promoter for promoting continuous transcription of a target gene in mammalian cells, and a bovine growth hormone polyadenylation signal sequence for increasing the stability level of RNA after transcription.

### Transformed Cell Expressing Fusion Protein

[0284] In another aspect of the present invention, there is provided a transformed cell expressing. Specifically, the transformed cell may be one into which the vector has been introduced.

[0285] Host cells for the transformed cell may include, but are not limited to, prokaryotic cells, eukaryotic cells, and cells of mammalian, plant, insect, fungal, or cellular origin. As an example of the prokaryotic cells, E. coli may be used. In addition, as an example of the eukaryotic cells, yeast may be used. In addition, for the mammalian cells, CHO cells, F2N cells, CSO cells, BHK cells, Bowes melanoma cells, HeLa cells, 911 cells, AT1080 cells, A549 cells, HEK 293 cells, HEK293T cells, or the like may be used. However, the mammalian cells are not limited thereto, and any cells which are known to those of ordinary skill in the art to be usable as mammalian host cells may be used.

[0286] In addition, for the introduction of an expression vector into the host cell, CaCl₂) precipitation, Hanahan method whose efficiency has been increased efficiency by using a reducing agent such as dimethyl sulfoxide (DMSO) in CaCl₂) precipitation, electroporation, calcium phosphate precipitation, protoplast fusion, agitation using silicon carbide fiber, Agrobacteria-mediated transformation, transformation using PEG, dextran sulfate-, Lipofectamine-, and dry/inhibition-mediated transformation, and the like may be used.

[0287] As described above, for optimization of properties of a fusion protein as a therapeutic agent or for any other purpose, glycosylation pattern of the fusion protein (for example, sialic acids, fucosylations, glycosylations) may be adjusted by manipulating, through methods known to those of ordinary skill in the art, glycosylation-related genes possessed by host cells.

### Method for Producing a Fusion Protein

[0288] In another aspect of the present invention, there is provided a method for producing a fusion protein comprising an antigen-binding site, a first Fc domain or a variant thereof, and a second Fc domain or a variant thereof, the method comprising the steps of: i) culturing the transformed cells; and ii) collecting the produced fusion proteins.

[0289] The step of culturing the transformed cells may be carried out using methods well known in the art. Specifically, the culture may be carried out in a batch process, or carried out continuously in a fed batch or repeated fed batch process.

### Composition or Preparation Containing Fusion Protein

[0290] In another aspect of the present invention, there is provided a pharmaceutical composition comprising the fusion protein as an active ingredient.

[0291] The pharmaceutical composition may be used for the prevention or treatment of cancer, such as any one cancer selected from the group consisting of gastric cancer, liver cancer, lung cancer, large intestine cancer, breast cancer, prostate cancer, gallbladder cancer, bladder cancer, kidney cancer, esophageal cancer, skin cancer, rectal cancer, osteosarcoma, multiple myeloma, glioma, ovarian cancer, pancreatic cancer, cervical cancer, endometrial cancer, thyroid cancer, laryngeal cancer, testicular cancer, mesothelioma, acute myeloid leukemia, chronic myeloid leukemia, acute lymphoblastic leukemia, chronic lymphoblastic leukemia, brain tumor, neuroblastoma, retinoblastoma, head and neck cancer, salivary gland cancer, and lymphoma.

[0292] A preferred dosage of the pharmaceutical composition varies depending on the patient's condition and body weight, severity of disease, form of drug, route and duration of administration and may be appropriately selected by those of ordinary skill in the art. In the pharmaceutical composition for treating or preventing tumor of the present invention, the active ingredient may be contained in any amount (effective amount) depending on application, dosage form, blending purpose, and the like, as long as the active ingredient may exhibit therapeutic activity against tumor or, in particular, may exhibit a therapeutic effect on cancer. A conventional effective amount thereof will be determined within a range of 0.001% to 20.0% by weight, based on the total weight of the composition. Here, the term “effective amount” refers to an amount of an active ingredient that may induce an effect of improving or treating the condition of a disease, especially an effect of improving or treating the condition of cancer. Such an effective amount may be experimentally determined within the scope of common knowledge of those of ordinary skill in the art.

[0293] As used herein, the term “treatment” may be used to mean both therapeutic and prophylactic treatment. Here, prophylaxis may be used to mean that a pathological condition or disease of a subject is alleviated or mitigated. In one embodiment, the term “treatment” includes both application or any form of administration for treating a disease in a mammal, including a human. In addition, the term includes inhibiting or slowing down the progression of a disease; and includes meanings of restoring or repairing impaired or lost function so that a disease is partially or completely alleviated; stimulating inefficient processes; or alleviating a serious disease.

[0294] Pharmacokinetic parameters such as bioavailability and underlying parameters such as clearance rate may also affect efficacy. Therefore, “improved efficacy” (for example, improvement in efficacy) may be due to improved pharmacokinetic parameters and improved efficacy, which may be measured by comparing clearance rate in test animals or human subjects, and parameters such as tumor treatment or improvement.

[0295] As used herein, the term “therapeutically effective amount” or “pharmaceutically effective amount” refers to an amount of a compound or composition effective to prevent or treat the disease in question, which is sufficient to treat the disease at a reasonable benefit/risk ratio applicable to medical treatment and does not cause adverse effects. A level of the effective amount may be determined depending on factors including the patient's health condition, type and severity of disease, activity of drug, the patient's sensitivity to drug, mode of administration, time of administration, route of administration and excretion rate, duration of treatment, combined or simultaneously used drugs, and other factors well known in the medical field. In one embodiment, the therapeutically effective amount means an amount of drug effective to treat cancer.

[0296] Here, the pharmaceutical composition may further comprise a pharmaceutically acceptable carrier. The pharmaceutically acceptable carrier may be any carrier as long as the carrier is a non-toxic substance suitable for delivery to a patient. Distilled water, alcohol, fat, wax, and inert solid may be contained as the carrier. A pharmaceutically acceptable adjuvant (buffer, dispersant) may also be contained in the pharmaceutical composition.

[0297] Specifically, by including a pharmaceutically acceptable carrier in addition to the active ingredient, the pharmaceutical composition may be prepared into a parenteral formulation depending on its route of administration using conventional methods known in the art. Here, the term “pharmaceutically acceptable” means that the carrier does not have more toxicity than the subject to be applied (prescribed) may adapt while not inhibiting activity of the active ingredient.

[0298] When the pharmaceutical composition is prepared into a parenteral formulation, it may be made into preparations in the form of injections, transdermal patches, nasal inhalants, or suppositories with suitable carriers according to methods known in the art. In a case of being made into injections, sterile water, ethanol, polyol such as glycerol or propylene glycol, or a mixture thereof may be used as a suitable carrier; and an isotonic solution, such as Ringer's solution, phosphate buffered saline (PBS) containing triethanol amine or sterile water for injection, and 5% dextrose, or the like may preferably be used. Formulation of pharmaceutical compositions is known in the art, and reference may specifically be made to Remington's Pharmaceutical Sciences (19th ed., 1995) and the like. This document is considered part of the present specification.

[0299] A preferred dosage of the pharmaceutical composition may range from 0.01 μg/kg to 10 g/kg, or 0.01 mg/kg to 1 g/kg, per day, depending on the patient's condition, body weight, sex, age, severity of the patient, and route of administration. The dosage may be administered once a day or may be divided into several times a day. Such a dosage should not be construed as limiting the scope of the present invention in any aspect.

[0300] Subjects to which the pharmaceutical composition may be applied (prescribed) are mammals including dogs, cats, humans, etc., with humans being particularly preferred. In addition to the active ingredient, the pharmaceutical composition of the present invention may further comprise any compound or natural extract, which is known to have a therapeutic effect on tumor.

### Treatment Method Using Fusion Protein

[0301] In another aspect of the present invention, there is provided a method for treating or preventing cancer, comprising administering a fusion protein comprising an antigen-binding site, a first Fc domain or a variant thereof, and a second Fc domain or a variant thereof administering to a subject.

[0302] In another aspect of the present invention, there is provided a use of a fusion protein comprising an antigen-binding site, a first Fc domain or a variant thereof, and a second Fc domain or a variant thereof for the treatment of cancer.

[0303] Here, the subject may be an individual suffering from cancer. In addition, the subject may be a mammal, preferably a human.

[0304] Route of administration, dosage, and frequency of administration of the fusion protein may vary depending on the patient's condition and the presence or absence of side effects, and thus the fusion protein may be administered to a subject in various ways and amounts. The optimal administration method, dosage, and frequency of administration may be selected in an appropriate range by those of ordinary skill in the art. In addition, the fusion protein may be administered in combination with other drugs or physiologically active substances whose therapeutic effect is known with respect to a disease to be treated, or may be formulated in the form of combination preparations with other drugs.

### MODE FOR CARRYING OUT THE INVENTION

[0305] Hereinafter, the present invention will be described in more detail by way of the following examples. However, the following examples are only for illustrating the present invention, and the scope of the present invention is not limited only to these examples.

### Example 1. Design, Preparation and Analysis of a Novel Antibody with Two Fc Domains

[0306] Naturally occurring human immunoglobulin G (IgG) consists of two fragment antigen-binding (Fab) regions and one fragment crystallizable (Fc) region (FIG. 1a). Human IgG binds to the target antigen in a monovalent or bivalent manner, and in some cases has 0.5 to 1 Fc region per target antigen (FIGS. 1c, 1d, and 1e).

[0307] The object of the present invention is to improve effector function by increasing the amount of Fc region present per antigen while having a molecular weight similar to that of an antibody and having a homogeneous composition. Therefore, we designed a novel antibody format with two Fc regions that has a molecular weight similar to that of a natural human IgG antibody (approximately 150 kDa) (FIG. 1b). This form binds to a cancer cell surface antigen and enables Fc regions to be present on a cancer cell surface a maximum of four times compared to conventional antibodies (FIGS. 1b and 1f).

[0308] In order to implement the novel antibody format mentioned above, trastuzumab was used as a template (FIG. 2a). In order to improve pairing between the VH-CH1 region and the VL-CL region of the trastuzumab Fab region, a specific amino acid was substituted with cysteine to introduce an artificial disulfide bond (FIGS. 2b, 2c, and 2d).

[0309] Fab in which glutamine (Q) at number 105 of the heavy chain and alanine (A) at number 43 of the light chain are substituted with cysteines, Fab in which phenylalanine (F) at number 122 of the heavy chain and serine (S) at number 121 of the light chain are substituted with cysteines, and Fab in which glycine (G) at number 44 of the heavy chain and glutamine (Q) at number 100 of the light chain are substituted with cysteines were designed, and they were referred to as Mutant 1, Mutant 2, and Mutant 3, respectively (FIGS. 2b, 2c, 2d, 3a, and 3b). Based on the above, the Fab-(Fc)₂ structure with trastuzumab as a template was referred to as wild type (WT) (FIG. 2a), and the Fab-(Fc)₂ structures with Fab corresponding to Mutants 1 to 3 were referred to as respective M1, M2, and M3 (FIGS. 2b, 2c, 2d, 3a, and 3b).

[0310] The notation of the positions in amino acids constituting an antibody follows the Kabat numbering system. In order to minimize unwanted Fc-related byproducts, knob-into-hole mutation technology (Merchant et al., Nat. Biotechnol. 1998) was applied to the Fc domain (SEQ ID NO: 3) of human immunoglobulin G1 (IgG1) to design polypeptides of Fc with knob mutation (S354C and T366W; SEQ ID NO: 4) and Fc with hole mutation (Y349C, T366S, L368A, and Y407V; SEQ ID NO: 5). In order to provide additional flexibility between the CL domain and hinge region, a (G4S)₃ linker was introduced (SEQ ID NO: 6; FIG. 2). The expression of WT was performed by co-transfection of vectors capable of expressing polypeptides corresponding to Fc-Hole (SEQ ID NO: 7), TraH-WT-Knob (SEQ ID NO: 8), and TraL-WT-Knob (SEQ ID NO: 9) into the EXPICHO-S™ (Gibco, A29127) cell line.

[0311] M1 consists of Fc-Hole (SEQ ID NO: 7), TraH-Q105C-Knob (SEQ ID NO: 10), and TraL-A43C-Knob (SEQ ID NO: 11), M2 consists of Fc-Hole (SEQ ID NO: 7), TraH-F122C-Knob (SEQ ID NO: 12), and TraL-S121C-Knob (SEQ ID NO: 13), and M3 consists of Fc-Hole (SEQ ID NO: 7), TraH-G44C-Knob (SEQ ID NO: 14), and TraL-Q100C-Knob (SEQ ID NO: 15). All of M1, M2, and M3 were expressed in the EXPICHO-S™ (Gibco, A29127) cell line. They were purified using an AKTA pure 25 (Cytiva) or AKTA avant 150 (Cytiva) protein isolation and purification system equipped with a CAPTURESELECT™ CH1-XL Pre-packed Column (Thermo Scientific, 494346205) purification column, and the purified product was further subjected to affinity chromatography using KappaSelect resin (Cytiva, 17545801), and the sample was concentrated using an Amicon Ultra-15 Centrifugal Filter Unit (Merck millipore). For the final purified product, the absorbance of the sample at 280 nm was measured using a NanoDrop One trace spectrophotometer (Thermo Fisher Scientific), and the concentration was quantified based on the sample's intrinsic extinction coefficient and molecular weight.

[0312] The purified product was analyzed using sodium dodecyl sulfate polyacrylamide gel electrophoresis (SDS-PAGE) and size exclusion chromatography (SEC) (FIGS. 4 and 5a to 5d). Bio-rad's electrophoresis gel and system were used for SDS-PAGE analysis, and samples were analyzed under non-reducing conditions, and size of each band were identified using Coomassie Brilliant Blue staining (FIG. 4). WT, M1, M2, and M3 were identified at about 150 kDa, and monomers were identified at about 75 kDa in WT which has no additional disulfide bond introduced into the Fab interface (FIG. 4). Similarly, for M1 and M2, a trace amount of monomer was identified at 75 kDa. For M3, almost no monomers were identified probably because most of the monomers were easily paired through the formation of disulfide bonds (FIG. 4).

[0313] For size exclusion chromatography analysis, an ALLIANCE® HPLC-e2695 Separations Module (Waters, 2695) equipped with an Agilent Bio SEC-3 HPLC column (Agilent, 5190-2511) was used. The analysis showed that the main product was identified at a retention time of 8.6 to 8.8 minutes (FIGS. 5a, 5b, 5c, and 5d).

[0314] Based on the M3 structure, the impact of the linker that connects the CL domain with the hinge region on the structural integrity of the antibody were analyzed. M3 has a 15-mer polypeptide linker consisting of (G₄S)₃, and V1 (SEQ ID NO: 7, 14, and 16) and V2 (SEQ ID NO: 7, 14, and 17) have polypeptide linkers of (G4S)₂ and G4S, respectively, and V3 (SEQ ID NO: 7, 14, and 18) directly linked the CL domain and the hinge region without a linker (FIG. 6). By SDS-PAGE analysis, the main product was identified at about 150 kDa, and the byproduct was not identified (FIG. 7). It was found that the presence or absence of a linker between the CL domain and the hinge region had no significant effect on the formation of the byproduct.

[0315] Based on these results, it was found that the Fab-(Fc)₂ structure was stably formed when the VH 44 and VL 100 positions of Fab were substituted with respective cysteines.

TABLE 7

| Name | Polypeptide sequence | SEQ ID NO |
|---|---|---|
| Trastuzumab VH- | EVQLVESGGGLVQPGGSLRLSCAASGFNIKDTYIHWVRQAPGKGLEW | 1 |
| CH1 domain | VARIYPTNGYTRYADSVKGRFTISADTSKNTAYLQMNSLRAEDTAVY | |
| | YCSRWGGDGFYAMDYWGQGTLVTVSSASTKGPSVFPLAPSSKSTSG | |
| | GTAALGCLVKDYFPEPVTVSWNSGALTSGVHTFPAVLQSSGLYSLSS | |
| | VVTVPSSSLGTQTYICNVNHKPSNTKVDKKV | |
| Trastuzumab VL- | DIQMTQSPSSLSASVGDRVTITCRASQDVNTAVAWYQQKPGKAPKLL | 2 |
| CL domain | IYSASFLYSGVPSRFSGSRSGTDFTLTISSLQPEDFATYYCQQHYTTPPT | |
| | FGQGTKVEIKRTVAAPSVFIFPPSDEQLKSGTASVVCLLNNFYPREAK | |
| | VQWKVDNALQSGNSQESVTEQDSKDSTYSLSSTLTLSKADYEKHKV | |
| | YACEVTHQGLSSPVTKSFNRGEC | |
| IgG1 Fc(CH2- | APELLGGPSVFLFPPKPKDTLMISRTPEVTCVVVDVSHEDPEVKFNWY | 3 |
| CH3) | VDGVEVHNAKTKPREEQYNSTYRVVSVLTVLHQDWLNGKEYKCKV | |
| | SNKALPAPIEKTISKAKGQPREPQVYTLPPSREEMTKNQVSLTCLVKG | |
| | FYPSDIAVEWESNGQPENNYKTTPPVLDSDGSFFLYSKLTVDKSRWQ | |
| | QGNVFSCSVMHEALHNHYTQKSLSLSPGK | |
| IgG1 Fc(Knob; | APELLGGPSVFLFPPKPKDTLMISRTPEVTCVVVDVSHEDPEVKFNWY | 4 |
| S354C, T366W) | VDGVEVHNAKTKPREEQYNSTYRVVSVLTVLHQDWLNGKEYKCKV | |
| | SNKALPAPIEKTISKAKGQPREPQVYTLPPCREEMTKNQVSLWCLVKG | |
| | FYPSDIAVEWESNGQPENNYKTTPPVLDSDGSFFLYSKLTVDKSRWQ | |
| | QGNVFSCSVMHEALHNHYTQKSLSLSPGK | |
| IgG1 Fc(Hole; | APELLGGPSVFLFPPKPKDTLMISRTPEVTCVVVDVSHEDPEVKFNWY | 5 |
| Y349C, T366S, | VDGVEVHNAKTKPREEQYNSTYRVVSVLTVLHQDWLNGKEYKCKV | |
| L368A, Y407V) | SNKALPAPIEKTISKAKGQPREPQVCTLPPSREEMTKNQVSLSCAVKG | |
| | FYPSDIAVEWESNGQPENNYKTTPPVLDSDGSFFLVSKLTVDKSRWQ | |
| | QGNVFSCSVMHEALHNHYTQKSLSLSPGK | |
| 15-mer Linker | GGGGSGGGGSGGGGS | 6 |
| Fc-Hole | DKTHTCPPCPAPELLGGPSVFLFPPKPKDTLMISRTPEVTCVVVDVSHE | 7 |
| | DPEVKFNWYVDGVEVHNAKTKPREEQYNSTYRVVSVLTVLHQDWL | |
| | NGKEYKCKVSNKALPAPIEKTISKAKGQPREPQVCTLPPSREEMTKNQ | |
| | VSLSCAVKGFYPSDIAVEWESNGQPENNYKTTPPVLDSDGSFFLVSKL | |
| | TVDKSRWQQGNVFSCSVMHEALHNHYTQKSLSLSPGK | |
| TraH-WT-Knob | EVQLVESGGGLVQPGGSLRLSCAASGFNIKDTYIHWVRQAPGKGLEW | 8 |
| | VARIYPTNGYTRYADSVKGRFTISADTSKNTAYLQMNSLRAEDTAVY | |
| | YCSRWGGDGFYAMDYWGQGTLVTVSSASTKGPSVFPLAPSSKSTSG | |
| | GTAALGCLVKDYFPEPVTVSWNSGALTSGVHTFPAVLQSSGLYSLSS | |
| | VVTVPSSSLGTQTYICNVNHKPSNTKVDKKVEPKSCDKTHTCPPCPAP | |
| | ELLGGPSVFLFPPKPKDTLMISRTPEVTCVVVDVSHEDPEVKFNWYVD | |
| | GVEVHNAKTKPREEQYNSTYRVVSVLTVLHQDWLNGKEYKCKVSN | |
| | KALPAPIEKTISKAKGQPREPQVYTLPPCREEMTKNQVSLWCLVKGFY | |
| | PSDIAVEWESNGQPENNYKTTPPVLDSDGSFFLYSKLTVDKSRWQQG | |
| | NVFSCSVMHEALHNHYTQKSLSLSPGK | |
| TraL-WT-Knob | DIQMTQSPSSLSASVGDRVTITCRASQDVNTAVAWYQQKPGKAPKLL | 9 |
| | IYSASFLYSGVPSRFSGSRSGTDFTLTISSLQPEDFATYYCQQHYTTPPT | |
| | FGQGTKVEIKRTVAAPSVFIFPPSDEQLKSGTASVVCLLNNFYPREAK | |
| | VQWKVDNALQSGNSQESVTEQDSKDSTYSLSSTLTLSKADYEKHKV | |
| | YACEVTHQGLSSPVTKSFNRGECGGGGGGGGSGGGGSEPKSSDKTH | |
| | TCPPCPAPELLGGPSVFLFPPKPKDTLMISRTPEVTCVVVDVSHEDPEV | |
| | KFNWYVDGVEVHNAKTKPREEQYNSTYRVVSVLTVLHQDWLNGKE | |
| | YKCKVSNKALPAPIEKTISKAKGQPREPQVYTLPPCREEMTKNQVSL | |
| | WCLVKGFYPSDIAVEWESNGQPENNYKTTPPVLDSDGSFFLYSKLTV | |
| | DKSRWQQGNVFSCSVMHEALHNHYTQKSLSLSPGK | |
| TraH-Q105C- | EVQLVESGGGLVQPGGSLRLSCAASGFNIKDTYIHWVRQAPGKGLEW | 10 |
| Knob | VARIYPTNGYTRYADSVKGRFTISADTSKNTAYLQMNSLRAEDTAVY | |
| | YCSRWGGDGFYAMDYWGCGTLVTVSSASTKGPSVFPLAPSSKSTSGG | |
| | TAALGCLVKDYFPEPVTVSWNSGALTSGVHTFPAVLQSSGLYSLSSV | |
| | VTVPSSSLGTQTYICNVNHKPSNTKVDKKVEPKSCDKTHTCPPCPAPE | |
| | LLGGPSVFLFPPKPKDTLMISRTPEVTCVVVDVSHEDPEVKFNWYVD | |
| | GVEVHNAKTKPREEQYNSTYRVVSVLTVLHQDWLNGKEYKCKVSN | |
| | KALPAPIEKTISKAKGQPREPQVYTLPPCREEMTKNQVSLWCLVKGFY | |
| | PSDIAVEWESNGQPENNYKTTPPVLDSDGSFFLYSKLTVDKSRWQQG | |
| | NVFSCSVMHEALHNHYTQKSLSLSPGK | |
| TraL-A43C-Knob | DIQMTQSPSSLSASVGDRVTITCRASQDVNTAVAWYQQKPGKCPKLLI | 11 |
| | YSASFLYSGVPSRFSGSRSGTDFTLTISSLQPEDFATYYCQQHYTTPPTF | |
| | GQGTKVEIKRTVAAPSVFIFPPSDEQLKSGTASVVCLLNNFYPREAKV | |
| | QWKVDNALQSGNSQESVTEQDSKDSTYSLSSTLTLSKADYEKHKVY | |
| | ACEVTHQGLSSPVTKSFNRGECGGGGSGGGGSGGGGSEPKSSDKTHT | |
| | CPPCPAPELLGGPSVFLFPPKPKDTLMISRTPEVTCVVVDVSHEDPEVK | |
| | FNWYVDGVEVHNAKTKPREEQYNSTYRVVSVLTVLHQDWLNGKEY | |
| | KCKVSNKALPAPIEKTISKAKGQPREPQVYTLPPCREEMTKNQVSLWC | |
| | LVKGFYPSDIAVEWESNGQPENNYKTTPPVLDSDGSFFLYSKLTVDKS | |
| | RWQQGNVFSCSVMHEALHNHYTQKSLSLSPGK | |
| TraH-F122C- | EVQLVESGGGLVQPGGSLRLSCAASGFNIKDTYIHWVRQAPGKGLEW | 12 |
| Knob | VARIYPTNGYTRYADSVKGRFTISADTSKNTAYLQMNSLRAEDTAVY | |
| | YCSRWGGDGFYAMDYWGQGTLVTVSSASTKGPSVCPLAPSSKSTSG | |
| | GTAALGCLVKDYFPEPVTVSWNSGALTSGVHTFPAVLQSSGLYSLSS | |
| | VVTVPSSSLGTQTYICNVNHKPSNTKVDKKVEPKSCDKTHTCPPCPAP | |
| | ELLGGPSVFLFPPKPKDTLMISRTPEVTCVVVDVSHEDPEVKFNWYVD | |
| | GVEVHNAKTKPREEQYNSTYRVVSVLTVLHQDWLNGKEYKCKVSN | |
| | KALPAPIEKTISKAKGQPREPQVYTLPPCREEMTKNQVSLWCLVKGFY | |
| | PSDIAVEWESNGQPENNYKTTPPVLDSDGSFFLYSKLTVDKSRWQQG | |
| | NVFSCSVMHEALHNHYTQKSLSLSPGK | |
| TraL-S121C- | DIQMTQSPSSLSASVGDRVTITCRASQDVNTAVAWYQQKPGKAPKLL | 13 |
| Knob | IYSASFLYSGVPSRFSGSRSGTDFTLTISSLQPEDFATYYCQQHYTTPPT | |
| | FGQGTKVEIKRTVAAPSVFIFPPCDEQLKSGTASVVCLLNNFYPREAK | |
| | VQWKVDNALQSGNSQESVTEQDSKDSTYSLSSTLTLSKADYEKHKV | |
| | YACEVTHQGLSSPVTKSFNRGECGGGGSGGGGSGGGGSEPKSSDKTH | |
| | TCPPCPAPELLGGPSVFLFPPKPKDTLMISRTPEVTCVVVDVSHEDPEV | |
| | KFNWYVDGVEVHNAKTKPREEQYNSTYRVVSVLTVLHQDWLNGKE | |
| | YKCKVSNKALPAPIEKTISKAKGQPREPQVYTLPPCREEMTKNQVSL | |
| | WCLVKGFYPSDIAVEWESNGQPENNYKTTPPVLDSDGSFFLYSKLTV | |
| | DKSRWQQGNVFSCSVMHEALHNRFTQKSLSLSPGK | |
| TraH-G44C-Knob | EVQLVESGGGLVQPGGSLRLSCAASGFNIKDTYIHWVRQAPGKCLEW | 14 |
| | VARIYPTNGYTRYADSVKGRFTISADTSKNTAYLQMNSLRAEDTAVY | |
| | YCSRWGGDGFYAMDYWGQGTLVTVSSASTKGPSVFPLAPSSKSTSG | |
| | GTAALGCLVKDYFPEPVTVSWNSGALTSGVHTFPAVLQSSGLYSLSS | |
| | VVTVPSSSLGTQTYICNVNHKPSNTKVDKKVEPKSCDKTHTCPPCPAP | |
| | ELLGGPSVFLFPPKPKDTLMISRTPEVTCVVVDVSHEDPEVKFNWYVD | |
| | GVEVHNAKTKPREEQYNSTYRVVSVLTVLHQDWLNGKEYKCKVSN | |
| | KALPAPIEKTISKAKGQPREPQVYTLPPCREEMTKNQVSLWCLVKGFY | |
| | PSDIAVEWESNGQPENNYKTTPPVLDSDGSFFLYSKLTVDKSRWQQG | |
| | NVFSCSVMHEALHNHYTQKSLSLSPGK | |
| TraL-Q100C- | DIQMTQSPSSLSASVGDRVTITCRASQDVNTAVAWYQQKPGKAPKLL | 15 |
| Knob | IYSASFLYSGVPSRFSGSRSGTDFTLTISSLQPEDFATYYCQQHYTTPPT | |
| | FGCGTKVEIKRTVAAPSVFIFPPSDEQLKSGTASVVCLLNNFYPREAKV | |
| | QWKVDNALQSGNSQESVTEQDSKDSTYSLSSTLTLSKADYEKHKVY | |
| | ACEVTHQGLSSPVTKSFNRGECGGGGSGGGGSGGGGSEPKSSDKTHT | |
| | CPPCPAPELLGGPSVFLFPPKPKDTLMISRTPEVTCVVVDVSHEDPEVK | |
| | FNWYVDGVEVHNAKTKPREEQYNSTYRVVSVLTVLHQDWLNGKEY | |
| | KCKVSNKALPAPIEKTISKAKGQPREPQVYTLPPCREEMTKNQVSLWC | |
| | LVKGFYPSDIAVEWESNGQPENNYKTTPPVLDSDGSFFLYSKLTVDKS | |
| | RWQQGNVFSCSVMHEALHNHYTQKSLSLSPGK | |
| TraL-Q100C- | DIQMTQSPSSLSASVGDRVTITCRASQDVNTAVAWYQQKPGKAPKLL | 16 |
| Knob1 | IYSASFLYSGVPSRFSGSRSGTDFTLTISSLQPEDFATYYCQQHYTTPPT | |
| | FGCGTKVEIKRTVAAPSVFIFPPSDEQLKSGTASVVCLLNNFYPREAKV | |
| | QWKVDNALQSGNSQESVTEQDSKDSTYSLSSTLTLSKADYEKHKVY | |
| | ACEVTHQGLSSPVTKSFNRGECGGGGSGGGGSEPKSSDKTHTCPPCPA | |
| | PELLGGPSVFLFPPKPKDTLMISRTPEVTCVVVDVSHEDPEVKFNWYV | |
| | DGVEVHNAKTKPREEQYNSTYRVVSVLTVLHQDWLNGKEYKCKVS | |
| | NKALPAPIEKTISKAKGQPREPQVYTLPPCREEMTKNQVSLWCL VKGF | |
| | YPSDIAVEWESNGQPENNYKTTPPVLDSDGSFFLYSKLTVDKSRWQQ | |
| | GNVFSCSVMHEALHNHYTQKSLSLSPGK | |
| TraL-Q100C- | DIQMTQSPSSLSASVGDRVTITCRASQDVNTAVAWYQQKPGKAPKLL | 17 |
| Knob2 | IYSASFLYSGVPSRFSGSRSGTDFTLTISSLQPEDFATYYCQQHYTTPPT | |
| | FGCGTKVEIKRTVAAPSVFIFPPSDEQLKSGTASVVCLLNNFYPREAKV | |
| | QWKVDNALQSGNSQESVTEQDSKDSTYSLSSTLTLSKADYEKHKVY | |
| | ACEVTHQGLSSPVTKSFNRGECGGGGSEPKSSDKTHTCPPCPAPELLG | |
| | GPSVFLFPPKPKDTLMISRTPEVTCVVVDVSHEDPEVKFNWYVDGVE | |
| | VHNAKTKPREEQYNSTYRVVSVLTVLHQDWLNGKEYKCKVSNKALP | |
| | APIEKTISKAKGQPREPQVYTLPPCREEMTKNQVSLWCL VKGFYPSDI | |
| | AVEWESNGQPENNYKTTPPVLDSDGSFFLYSKLTVDKSRWQQGNVFS | |
| | CSVMHEALHNHYTQKSLSLSPGK | |
| TraL-Q100C- | DIQMTQSPSSLSASVGDRVTITCRASQDVNTAVAWYQQKPGKAPKLL | 18 |
| Knob3 | IYSASFLYSGVPSRFSGSRSGTDFTLTISSLQPEDFATYYCQQHYTTPPT | |
| | FGCGTKVEIKRTVAAPSVFIFPPSDEQLKSGTASVVCLLNNFYPREAKV | |
| | QWKVDNALQSGNSQESVTEQDSKDSTYSLSSTLTLSKADYEKHKVY | |
| | ACEVTHQGLSSPVTKSFNRGECEPKSSDKTHTCPPCPAPELLGGPSVFL | |
| | FPPKPKDTLMISRTPEVTCVVVDVSHEDPEVKFNWYVDGVEVHNAKT | |
| | KPREEQYNSTYRVVSVLTVLHQDWLNGKEYKCKVSNKALPAPIEKTI | |
| | SKAKGQPREPQVYTLPPCREEMTKNQVSLWCLVKGFYPSDIAVEWES | |
| | NGQPENNYKTTPPVLDSDGSFFLYSKLTVDKSRWQQGNVFSCSVMHE | |
| | ALHNHYTQKSLSLSPGK | |

TABLE 8

| Name | Nucleotide sequence | SEQ ID NO |
|---|---|---|
| Trastuzumab VH- | GAAGTGCAGCTGGTCGAAAGTGGCGGTGGACTTGTGCAACCTGGCGG | 452 |
| CH1 domain | TAGCCTCCGTCTCAGCTGCGCTGCAAGTGGGTTCAACATCAAGGACA | |
| | CTTATATTCATTGGGTCCGACAGGCACCTGGGAAAGGTTTGGAGTGG | |
| | GTCGCACGGATCTATCCCACTAATGGTTACACAAGATATGCCGATTC | |
| | AGTAAAAGGCCGGTTTACAATCAGCGCAGATACTTCAAAAAACACTG | |
| | CCTATCTTCAAATGAACTCACTTCGAGCAGAAGACACAGCCGTCTAT | |
| | TATTGTAGTCGTTGGGGAGGCGACGGCTTTTATGCTATGGACTACTGG | |
| | GGACAAGGAACTCTGGTCACAGTTTCATCAGCTAGCACCAAAGGACC | |
| | TAGTGTTTTTCCTCTTGCCCCTTCCTCAAAGTCTACCTCTGGGGGGAC | |
| | AGCCGCTCTGGGCTGCCTGGTCAAGGATTATTTCCCAGAGCCTGTCAC | |
| | TGTCAGTTGGAACTCTGGAGCCTTGACTTCTGGTGTTCATACATTTCC | |
| | TGCTGTCCTTCAAAGCAGCGGCTTGTACTCATTGTCTTCTGTTGTGAC | |
| | AGTACCCTCAAGCAGCCTCGGCACTCAGACATACATCTGCAATGTCA | |
| | ACCACAAACCCTCAAATACAAAGGTAGATAAAAAAGTC | |
| Trastuzumab VL- | GATATTCAGATGACTCAGAGTCCTAGTTCCCTCAGCGCCTCCGTAGGC | 453 |
| CL domain | GACAGAGTTACAATAACTTGCCGAGCAAGCCAAGACGTAAACACTGC | |
| | AGTCGCCTGGTACCAACAGAAACCAGGCAAAGCTCCAAAACTCTTGA | |
| | TTTACAGTGCTTCCTTCCTTTATAGTGGCGTTCCAAGCCGCTTCAGCG | |
| | GCAGCCGCTCTGGCACCGACTTCACTCTCACTATTTCTTCCTTGCAAC | |
| | CTGAAGACTTCGCCACTTATTATTGCCAGCAACACTACACAACACCC | |
| | CCAACATTCGGACAGGGCACAAAGGTAGAAATAAAACGTACGGTGG | |
| | CAGCTCCCAGCGTTTTTATCTTTCCCCCATCCGACGAGCAGCTCAAGA | |
| | GTGGCACTGCCTCTGTAGTTTGTTTGCTGAATAACTTCTATCCACGTG | |
| | AAGCAAAAGTACAGTGGAAGGTCGATAATGCCCTTCAGAGCGGTAA | |
| | CAGCCAAGAAAGTGTTACCGAGCAAGATTCCAAAGATTCCACTTACA | |
| | GTCTGTCCAGCACATTGACACTGAGTAAGGCTGATTACGAAAAACAC | |
| | AAGGTGTACGCATGCGAGGTGACACACCAAGGTCTTTCATCTCCTGT | |
| | AACTAAGAGCTTTAACCGGGGAGAATGT | |
| IgG1 Fc(CH2- | GCACCTGAACTCCTGGGGGGACCGTCAGTCTTCCTCTTCCCCCCAAAA | 454 |
| CH3) | CCCAAGGACACCCTCATGATCTCCCGGACCCCTGAGGTCACATGCGT | |
| | GGTGGTGGACGTGAGCCACGAAGACCCTGAGGTCAAGTTCAACTGGT | |
| | ACGTGGACGGCGTGGAGGTGCATAATGCCAAGACAAAGCCGCGGGA | |
| | GGAGCAGTACAACAGCACGTACCGTGTGGTCAGCGTCCTCACCGTCC | |
| | TGCACCAGGACTGGCTGAATGGCAAGGAGTACAAGTGCAAGGTCTCC | |
| | AACAAAGCCCTCCCAGCCCCCATCGAGAAAACCATCTCCAAAGCCAA | |
| | AGGGCAGCCCCGAGAACCACAGGTGTACACCCTGCCCCCAAGCCGG | |
| | GAGGAGATGACCAAGAACCAGGTCAGCCTGACGTGCCTGGTCAAAG | |
| | GCTTCTATCCCAGCGACATCGCCGTGGAGTGGGAGAGCAATGGGCAG | |
| | CCGGAGAACAACTACAAGACCACGCCTCCCGTGCTGGACTCCGACGG | |
| | CTCCTTCTTCCTCTACAGCAAGCTCACCGTGGACAAGAGCAGGTGGC | |
| | AGCAGGGGAACGTCTTCTCATGCTCCGTGATGCATGAGGCTCTGCAC | |
| | AACCACTACACGCAGAAGAGCCTCTCCCTGTCTCCGGGTAAA | |
| IgG1 Fc(Knob; | GCACCTGAACTCCTGGGGGGACCGTCAGTCTTCCTCTTCCCCCCAAAA | 455 |
| S354C, T366W) | CCCAAGGACACCCTCATGATCTCCCGGACCCCTGAGGTCACATGCGT | |
| | GGTGGTGGACGTGAGCCACGAAGACCCTGAGGTCAAGTTCAACTGGT | |
| | ACGTGGACGGCGTGGAGGTGCATAATGCCAAGACAAAGCCGCGGGA | |
| | GGAGCAGTACAACAGCACGTACCGTGTGGTCAGCGTCCTCACCGTCC | |
| | TGCACCAGGACTGGCTGAATGGCAAGGAGTACAAGTGCAAGGTCTCC | |
| | AACAAAGCCCTCCCAGCCCCCATCGAGAAAACCATCTCCAAAGCCAA | |
| | AGGGCAGCCCCGAGAACCACAGGTGTACACCCTGCCCCCATGCCGGG | |
| | AGGAGATGACCAAGAACCAGGTCAGCCTGTGGTGCCTGGTCAAAGG | |
| | CTTCTATCCCAGCGACATCGCCGTGGAGTGGGAGAGCAATGGGCAGC | |
| | CGGAGAACAACTACAAGACCACGCCTCCCGTGCTGGACTCCGACGGC | |
| | TCCTTCTTCCTCTACAGCAAGCTCACCGTGGACAAGAGCAGGTGGCA | |
| | GCAGGGGAACGTCTTCTCATGCTCCGTGATGCATGAGGCTCTGCACA | |
| | ACCACTACACGCAGAAGAGCCTCTCCCTGTCTCCGGGTAAA | |
| IgG1 Fc(Hole; | GCACCTGAACTCCTGGGGGGACCGTCAGTCTTCCTCTTCCCCCCAAAA | 456 |
| Y349C, T366S, | CCCAAGGACACCCTCATGATCTCCCGGACCCCTGAGGTCACATGCGT | |
| L368A, Y407V) | GGTGGTGGACGTGAGCCACGAAGACCCTGAGGTCAAGTTCAACTGGT | |
| | ACGTGGACGGCGTGGAGGTGCATAATGCCAAGACAAAGCCGCGGGA | |
| | GGAGCAGTACAACAGCACGTACCGTGTGGTCAGCGTCCTCACCGTCC | |
| | TGCACCAGGACTGGCTGAATGGCAAGGAGTACAAGTGCAAGGTCTCC | |
| | AACAAAGCCCTCCCAGCCCCCATCGAGAAAACCATCTCCAAAGCCAA | |
| | AGGGCAGCCCCGAGAACCACAGGTGTGCACCCTGCCCCCATCCCGGG | |
| | AGGAGATGACCAAGAACCAGGTCAGCCTGAGCTGCGCGGTCAAAGG | |
| | CTTCTATCCCAGCGACATCGCCGTGGAGTGGGAGAGCAATGGGCAGC | |
| | CGGAGAACAACTACAAGACCACGCCTCCCGTGCTGGACTCCGACGGC | |
| | TCCTTCTTCCTCGTGAGCAAGCTCACCGTGGACAAGAGCAGGTGGCA | |
| | GCAGGGGAACGTCTTCTCATGCTCCGTGATGCATGAGGCTCTGCACA | |
| | ACCACTACACGCAGAAGAGCCTCTCCCTGTCTCCGGGTAAA | |
| 15-mer Linker | GGTGGTGGGGGCAGCGGGGGCGGAGGTAGTGGAGGCGGCGGTAGT | 457 |
| Fc-Hole | GACAAAACTCACACATGCCCACCGTGCCCAGCACCTGAACTCCTGGG | 458 |
| | GGGACCGTCAGTCTTCCTCTTCCCCCCAAAACCCAAGGACACCCTCAT | |
| | GATCTCCCGGACCCCTGAGGTCACATGCGTGGTGGTGGACGTGAGCC | |
| | ACGAAGACCCTGAGGTCAAGTTCAACTGGTACGTGGACGGCGTGGAG | |
| | GTGCATAATGCCAAGACAAAGCCGCGGGAGGAGCAGTACAACAGCA | |
| | CGTACCGTGTGGTCAGCGTCCTCACCGTCCTGCACCAGGACTGGCTG | |
| | AATGGCAAGGAGTACAAGTGCAAGGTCTCCAACAAAGCCCTCCCAGC | |
| | CCCCATCGAGAAAACCATCTCCAAAGCCAAAGGGCAGCCCCGAGAA | |
| | CCACAGGTGTGCACCCTGCCCCCATCCCGGGAGGAGATGACCAAGAA | |
| | CCAGGTCAGCCTGAGCTGCGCGGTCAAAGGCTTCTATCCCAGCGACA | |
| | TCGCCGTGGAGTGGGAGAGCAATGGGCAGCCGGAGAACAACTACAA | |
| | GACCACGCCTCCCGTGCTGGACTCCGACGGCTCCTTCTTCCTCGTGAG | |
| | CAAGCTCACCGTGGACAAGAGCAGGTGGCAGCAGGGGAACGTCTTCT | |
| | CATGCTCCGTGATGCATGAGGCTCTGCACAACCACTACACGCAGAAG | |
| | AGCCTCTCCCTGTCTCCGGGTAAA | |
| TraH-WT-Knob | GAAGTTCAACTTGTGGAGTCTGGAGGCGGTTTGGTACAACCTGGAGG | 459 |
| | TTCACTTCGTTTGTCATGTGCTGCCTCTGGGTTTAATATCAAGGATAC | |
| | TTATATTCATTGGGTTCGCCAGGCACCCGGAAAAGGGCTGGAATGGG | |
| | TGGCCCGTATATATCCCACTAACGGTTACACTCGATATGCTGACTCTG | |
| | TAAAGGGTCGATTTACTATATCCGCTGATACTAGCAAAAACACTGCC | |
| | TACCTCCAGATGAACAGTCTGCGCGCCGAGGATACAGCAGTTTATTA | |
| | TTGTTCCCGATGGGGAGGTGACGGGTTCTATGCCATGGACTACTGGG | |
| | GTCAAGGGACACTGGTAACCGTTTCTTCTGCTAGCACCAAAGGACCT | |
| | AGTGTTTTTCCTCTTGCCCCTTCCTCAAAGTCTACCTCTGGGGGGACA | |
| | GCCGCTCTGGGCTGCCTGGTCAAGGATTATTTCCCAGAGCCTGTCACT | |
| | GTCAGTTGGAACTCTGGAGCCTTGACTTCTGGTGTTCATACATTTCCT | |
| | GCTGTCCTTCAAAGCAGCGGCTTGTACTCATTGTCTTCTGTTGTGACA | |
| | GTACCCTCAAGCAGCCTCGGCACTCAGACATACATCTGCAATGTCAA | |
| | CCACAAACCCTCAAATACAAAGGTAGATAAAAAAGTCGAACCAAAG | |
| | TCTTGTGACAAAACTCACACGTGCCCACCGTGCCCAGCACCTGAACT | |
| | CCTGGGGGGACCGTCAGTCTTCCTCTTCCCCCCAAAACCCAAGGACA | |
| | CCCTCATGATCTCCCGGACCCCTGAGGTCACATGCGTGGTGGTGGAC | |
| | GTGAGCCACGAAGACCCTGAGGTCAAGTTCAACTGGTACGTGGACGG | |
| | CGTGGAGGTGCATAATGCCAAGACAAAGCCGCGGGAGGAGCAGTAC | |
| | AACAGCACGTACCGTGTGGTCAGCGTCCTCACCGTCCTGCACCAGGA | |
| | CTGGCTGAATGGCAAGGAGTACAAGTGCAAGGTCTCCAACAAAGCCC | |
| | TCCCAGCCCCCATCGAGAAAACCATCTCCAAAGCCAAAGGGCAGCCC | |
| | CGAGAACCACAGGTGTACACCCTGCCCCCATGCCGGGAGGAGATGAC | |
| | CAAGAACCAGGTCAGCCTGTGGTGCCTGGTCAAAGGCTTCTATCCCA | |
| | GCGACATCGCCGTGGAGTGGGAGAGCAATGGGCAGCCGGAGAACAA | |
| | CTACAAGACCACGCCTCCCGTGCTGGACTCCGACGGCTCCTTCTTCCT | |
| | CTACAGCAAGCTCACCGTGGACAAGAGCAGGTGGCAGCAGGGGAAC | |
| | GTCTTCTCATGCTCCGTGATGCATGAGGCTCTGCACAACCACTACACG | |
| | CAGAAGAGCCTCTCCCTGTCTCCGGGTAAA | |
| TraL-WT-Knob | GACATTCAGATGACCCAATCCCCCTCTAGCCTTTCAGCCTCCGTAGGG | 460 |
| | GACAGAGTTACAATAACCTGTAGGGCTAGTCAGGACGTTAATACAGC | |
| | AGTCGCATGGTACCAGCAGAAGCCCGGTAAGGCTCCTAAGCTTTTGA | |
| | TCTACAGTGCTTCTTTCCTGTATTCTGGTGTACCTAGCCGATTCTCAG | |
| | GCTCTCGGAGTGGCACAGACTTCACTCTGACAATTTCAAGTCTCCAGC | |
| | CAGAAGATTTTGCAACCTACTACTGCCAACAACACTACACTACTCCTC | |
| | CAACCTTCGGACAGGGCACAAAAGTAGAGATTAAGCGTACGGTGGC | |
| | AGCTCCCAGCGTTTTTATCTTTCCCCCATCCGACGAGCAGCTCAAGAG | |
| | TGGCACTGCCTCTGTAGTTTGTTTGCTGAATAACTTCTATCCACGTGA | |
| | AGCAAAAGTACAGTGGAAGGTCGATAATGCCCTTCAGAGCGGTAAC | |
| | AGCCAAGAAAGTGTTACCGAGCAAGATTCCAAAGATTCCACTTACAG | |
| | TCTGTCCAGCACATTGACACTGAGTAAGGCTGATTACGAAAAACACA | |
| | AGGTGTACGCATGCGAGGTGACACACCAAGGTCTTTCATCTCCTGTA | |
| | ACTAAGAGCTTTAACCGGGGAGAATGTGGTGGTGGGGGCAGCGGGG | |
| | GCGGAGGTAGTGGAGGCGGCGGTAGTGAACCAAAGAGTAGTGACAA | |
| | AACTCACACGTGCCCACCGTGCCCAGCACCTGAACTCCTGGGGGGAC | |
| | CGTCAGTCTTCCTCTTCCCCCCAAAACCCAAGGACACCCTCATGATCT | |
| | CCCGGACCCCTGAGGTCACATGCGTGGTGGTGGACGTGAGCCACGAA | |
| | GACCCTGAGGTCAAGTTCAACTGGTACGTGGACGGCGTGGAGGTGCA | |
| | TAATGCCAAGACAAAGCCGCGGGAGGAGCAGTACAACAGCACGTAC | |
| | CGTGTGGTCAGCGTCCTCACCGTCCTGCACCAGGACTGGCTGAATGG | |
| | CAAGGAGTACAAGTGCAAGGTCTCCAACAAAGCCCTCCCAGCCCCCA | |
| | TCGAGAAAACCATCTCCAAAGCCAAAGGGCAGCCCCGAGAACCACA | |
| | GGTGTACACCCTGCCCCCATGCCGGGAGGAGATGACCAAGAACCAG | |
| | GTCAGCCTGTGGTGCCTGGTCAAAGGCTTCTATCCCAGCGACATCGC | |
| | CGTGGAGTGGGAGAGCAATGGGCAGCCGGAGAACAACTACAAGACC | |
| | ACGCCTCCCGTGCTGGACTCCGACGGCTCCTTCTTCCTCTACAGCAAG | |
| | CTCACCGTGGACAAGAGCAGGTGGCAGCAGGGGAACGTCTTCTCATG | |
| | CTCCGTGATGCATGAGGCTCTGCACAACCACTACACGCAGAAGAGCC | |
| | TCTCCCTGTCTCCGGGTAAA | |
| TraH-Q105C- | GAAGTTCAACTTGTGGAGTCTGGAGGCGGTTTGGTACAACCTGGAGG | 461 |
| Knob | TTCACTTCGTTTGTCATGTGCTGCCTCTGGGTTTAATATCAAGGATAC | |
| | TTATATTCATTGGGTTCGCCAGGCACCCGGAAAAGGGCTGGAATGGG | |
| | TGGCCCGTATATATCCCACTAACGGTTACACTCGATATGCTGACTCTG | |
| | TAAAGGGTCGATTTACTATATCCGCTGATACTAGCAAAAACACTGCC | |
| | TACCTCCAGATGAACAGTCTGCGCGCCGAGGATACAGCAGTTTATTA | |
| | TTGTTCCCGATGGGGAGGTGACGGGTTCTATGCCATGGACTACTGGG | |
| | GTTGTGGGACACTGGTAACCGTTTCTTCTGCTAGCACCAAAGGACCT | |
| | AGTGTTTTTCCTCTTGCCCCTTCCTCAAAGTCTACCTCTGGGGGGACA | |
| | GCCGCTCTGGGCTGCCTGGTCAAGGATTATTTCCCAGAGCCTGTCACT | |
| | GTCAGTTGGAACTCTGGAGCCTTGACTTCTGGTGTTCATACATTTCCT | |
| | GCTGTCCTTCAAAGCAGCGGCTTGTACTCATTGTCTTCTGTTGTGACA | |
| | GTACCCTCAAGCAGCCTCGGCACTCAGACATACATCTGCAATGTCAA | |
| | CCACAAACCCTCAAATACAAAGGTAGATAAAAAAGTCGAACCAAAG | |
| | TCTTGTGACAAAACTCACACGTGCCCACCGTGCCCAGCACCTGAACT | |
| | CCTGGGGGGACCGTCAGTCTTCCTCTTCCCCCCAAAACCCAAGGACA | |
| | CCCTCATGATCTCCCGGACCCCTGAGGTCACATGCGTGGTGGTGGAC | |
| | GTGAGCCACGAAGACCCTGAGGTCAAGTTCAACTGGTACGTGGACGG | |
| | CGTGGAGGTGCATAATGCCAAGACAAAGCCGCGGGAGGAGCAGTAC | |
| | AACAGCACGTACCGTGTGGTCAGCGTCCTCACCGTCCTGCACCAGGA | |
| | CTGGCTGAATGGCAAGGAGTACAAGTGCAAGGTCTCCAACAAAGCCC | |
| | TCCCAGCCCCCATCGAGAAAACCATCTCCAAAGCCAAAGGGCAGCCC | |
| | CGAGAACCACAGGTGTACACCCTGCCCCCATGCCGGGAGGAGATGAC | |
| | CAAGAACCAGGTCAGCCTGTGGTGCCTGGTCAAAGGCTTCTATCCCA | |
| | GCGACATCGCCGTGGAGTGGGAGAGCAATGGGCAGCCGGAGAACAA | |
| | CTACAAGACCACGCCTCCCGTGCTGGACTCCGACGGCTCCTTCTTCCT | |
| | CTACAGCAAGCTCACCGTGGACAAGAGCAGGTGGCAGCAGGGGAAC | |
| | GTCTTCTCATGCTCCGTGATGCATGAGGCTCTGCACAACCACTACACG | |
| | CAGAAGAGCCTCTCCCTGTCTCCGGGTAAA | |
| TraL-A43C-Knob | GACATTCAGATGACCCAATCCCCCTCTAGCCTTTCAGCCTCCGTAGGG | 462 |
| | GACAGAGTTACAATAACCTGTAGGGCTAGTCAGGACGTTAATACAGC | |
| | AGTCGCATGGTACCAGCAGAAGCCCGGTAAGTGTCCTAAGCTTTTGA | |
| | TCTACAGTGCTTCTTTCCTGTATTCTGGTGTACCTAGCCGATTCTCAG | |
| | GCTCTCGGAGTGGCACAGACTTCACTCTGACAATTTCAAGTCTCCAGC | |
| | CAGAAGATTTTGCAACCTACTACTGCCAACAACACTACACTACTCCTC | |
| | CAACCTTCGGACAGGGCACAAAAGTAGAGATTAAGCGTACGGTGGC | |
| | AGCTCCCAGCGTTTTTATCTTTCCCCCATCCGACGAGCAGCTCAAGAG | |
| | TGGCACTGCCTCTGTAGTTTGTTTGCTGAATAACTTCTATCCACGTGA | |
| | AGCAAAAGTACAGTGGAAGGTCGATAATGCCCTTCAGAGCGGTAAC | |
| | AGCCAAGAAAGTGTTACCGAGCAAGATTCCAAAGATTCCACTTACAG | |
| | TCTGTCCAGCACATTGACACTGAGTAAGGCTGATTACGAAAAACACA | |
| | AGGTGTACGCATGCGAGGTGACACACCAAGGTCTTTCATCTCCTGTA | |
| | ACTAAGAGCTTTAACCGGGGAGAATGTGGTGGTGGGGGCAGCGGGG | |
| | GCGGAGGTAGTGGAGGCGGCGGTAGTGAACCAAAGAGTAGTGACAA | |
| | AACTCACACGTGCCCACCGTGCCCAGCACCTGAACTCCTGGGGGGAC | |
| | CGTCAGTCTTCCTCTTCCCCCCAAAACCCAAGGACACCCTCATGATCT | |
| | CCCGGACCCCTGAGGTCACATGCGTGGTGGTGGACGTGAGCCACGAA | |
| | GACCCTGAGGTCAAGTTCAACTGGTACGTGGACGGCGTGGAGGTGCA | |
| | TAATGCCAAGACAAAGCCGCGGGAGGAGCAGTACAACAGCACGTAC | |
| | CGTGTGGTCAGCGTCCTCACCGTCCTGCACCAGGACTGGCTGAATGG | |
| | CAAGGAGTACAAGTGCAAGGTCTCCAACAAAGCCCTCCCAGCCCCCA | |
| | TCGAGAAAACCATCTCCAAAGCCAAAGGGCAGCCCCGAGAACCACA | |
| | GGTGTACACCCTGCCCCCATGCCGGGAGGAGATGACCAAGAACCAG | |
| | GTCAGCCTGTGGTGCCTGGTCAAAGGCTTCTATCCCAGCGACATCGC | |
| | CGTGGAGTGGGAGAGCAATGGGCAGCCGGAGAACAACTACAAGACC | |
| | ACGCCTCCCGTGCTGGACTCCGACGGCTCCTTCTTCCTCTACAGCAAG | |
| | CTCACCGTGGACAAGAGCAGGTGGCAGCAGGGGAACGTCTTCTCATG | |
| | CTCCGTGATGCATGAGGCTCTGCACAACCACTACACGCAGAAGAGCC | |
| | TCTCCCTGTCTCCGGGTAAA | |
| TraH-F122C- | GAAGTTCAACTTGTGGAGTCTGGAGGCGGTTTGGTACAACCTGGAGG | 463 |
| Knob | TTCACTTCGTTTGTCATGTGCTGCCTCTGGGTTTAATATCAAGGATAC | |
| | TTATATTCATTGGGTTCGCCAGGCACCCGGAAAAGGGCTGGAATGGG | |
| | TGGCCCGTATATATCCCACTAACGGTTACACTCGATATGCTGACTCTG | |
| | TAAAGGGTCGATTTACTATATCCGCTGATACTAGCAAAAACACTGCC | |
| | TACCTCCAGATGAACAGTCTGCGCGCCGAGGATACAGCAGTTTATTA | |
| | TTGTTCCCGATGGGGAGGTGACGGGTTCTATGCCATGGACTACTGGG | |
| | GTCAAGGGACACTGGTAACCGTTTCTTCTGCTAGCACCAAAGGACCT | |
| | AGTGTTTGTCCTCTTGCCCCTTCCTCAAAGTCTACCTCTGGGGGGACA | |
| | GCCGCTCTGGGCTGCCTGGTCAAGGATTATTTCCCAGAGCCTGTCACT | |
| | GTCAGTTGGAACTCTGGAGCCTTGACTTCTGGTGTTCATACATTTCCT | |
| | GCTGTCCTTCAAAGCAGCGGCTTGTACTCATTGTCTTCTGTTGTGACA | |
| | GTACCCTCAAGCAGCCTCGGCACTCAGACATACATCTGCAATGTCAA | |
| | CCACAAACCCTCAAATACAAAGGTAGATAAAAAAGTCGAACCAAAG | |
| | TCTTGTGACAAAACTCACACGTGCCCACCGTGCCCAGCACCTGAACT | |
| | CCTGGGGGGACCGTCAGTCTTCCTCTTCCCCCCAAAACCCAAGGACA | |
| | CCCTCATGATCTCCCGGACCCCTGAGGTCACATGCGTGGTGGTGGAC | |
| | GTGAGCCACGAAGACCCTGAGGTCAAGTTCAACTGGTACGTGGACGG | |
| | CGTGGAGGTGCATAATGCCAAGACAAAGCCGCGGGAGGAGCAGTAC | |
| | AACAGCACGTACCGTGTGGTCAGCGTCCTCACCGTCCTGCACCAGGA | |
| | CTGGCTGAATGGCAAGGAGTACAAGTGCAAGGTCTCCAACAAAGCCC | |
| | TCCCAGCCCCCATCGAGAAAACCATCTCCAAAGCCAAAGGGCAGCCC | |
| | CGAGAACCACAGGTGTACACCCTGCCCCCATGCCGGGAGGAGATGAC | |
| | CAAGAACCAGGTCAGCCTGTGGTGCCTGGTCAAAGGCTTCTATCCCA | |
| | GCGACATCGCCGTGGAGTGGGAGAGCAATGGGCAGCCGGAGAACAA | |
| | CTACAAGACCACGCCTCCCGTGCTGGACTCCGACGGCTCCTTCTTCCT | |
| | CTACAGCAAGCTCACCGTGGACAAGAGCAGGTGGCAGCAGGGGAAC | |
| | GTCTTCTCATGCTCCGTGATGCATGAGGCTCTGCACAACCACTACACG | |
| | CAGAAGAGCCTCTCCCTGTCTCCGGGTAAA | |
| TraL-S121C- | GACATTCAGATGACCCAATCCCCCTCTAGCCTTTCAGCCTCCGTAGGG | 464 |
| Knob | GACAGAGTTACAATAACCTGTAGGGCTAGTCAGGACGTTAATACAGC | |
| | AGTCGCATGGTACCAGCAGAAGCCCGGTAAGGCTCCTAAGCTTTTGA | |
| | TCTACAGTGCTTCTTTCCTGTATTCTGGTGTACCTAGCCGATTCTCAG | |
| | GCTCTCGGAGTGGCACAGACTTCACTCTGACAATTTCAAGTCTCCAGC | |
| | CAGAAGATTTTGCAACCTACTACTGCCAACAACACTACACTACTCCTC | |
| | CAACCTTCGGACAGGGCACAAAAGTAGAGATTAAGCGTACGGTGGC | |
| | AGCTCCCAGCGTTTTTATCTTTCCCCCATGTGACGAGCAGCTCAAGAG | |
| | TGGCACTGCCTCTGTAGTTTGTTTGCTGAATAACTTCTATCCACGTGA | |
| | AGCAAAAGTACAGTGGAAGGTCGATAATGCCCTTCAGAGCGGTAAC | |
| | AGCCAAGAAAGTGTTACCGAGCAAGATTCCAAAGATTCCACTTACAG | |
| | TCTGTCCAGCACATTGACACTGAGTAAGGCTGATTACGAAAAACACA | |
| | AGGTGTACGCATGCGAGGTGACACACCAAGGTCTTTCATCTCCTGTA | |
| | ACTAAGAGCTTTAACCGGGGAGAATGTGGTGGTGGGGGCAGCGGGG | |
| | GCGGAGGTAGTGGAGGCGGCGGTAGTGAACCAAAGAGTAGTGACAA | |
| | AACTCACACGTGCCCACCGTGCCCAGCACCTGAACTCCTGGGGGGAC | |
| | CGTCAGTCTTCCTCTTCCCCCCAAAACCCAAGGACACCCTCATGATCT | |
| | CCCGGACCCCTGAGGTCACATGCGTGGTGGTGGACGTGAGCCACGAA | |
| | GACCCTGAGGTCAAGTTCAACTGGTACGTGGACGGCGTGGAGGTGCA | |
| | TAATGCCAAGACAAAGCCGCGGGAGGAGCAGTACAACAGCACGTAC | |
| | CGTGTGGTCAGCGTCCTCACCGTCCTGCACCAGGACTGGCTGAATGG | |
| | CAAGGAGTACAAGTGCAAGGTCTCCAACAAAGCCCTCCCAGCCCCCA | |
| | TCGAGAAAACCATCTCCAAAGCCAAAGGGCAGCCCCGAGAACCACA | |
| | GGTGTACACCCTGCCCCCATGCCGGGAGGAGATGACCAAGAACCAG | |
| | GTCAGCCTGTGGTGCCTGGTCAAAGGCTTCTATCCCAGCGACATCGC | |
| | CGTGGAGTGGGAGAGCAATGGGCAGCCGGAGAACAACTACAAGACC | |
| | ACGCCTCCCGTGCTGGACTCCGACGGCTCCTTCTTCCTCTACAGCAAG | |
| | CTCACCGTGGACAAGAGCAGGTGGCAGCAGGGGAACGTCTTCTCATG | |
| | CTCCGTGATGCATGAGGCTCTGCACAACAGATTTACGCAGAAGAGCC | |
| | TCTCCCTGTCTCCGGGTAAA | |
| TraH-G44C-Knob | GAAGTTCAACTTGTGGAGTCTGGAGGCGGTTTGGTACAACCTGGAGG | 465 |
| | TTCACTTCGTTTGTCATGTGCTGCCTCTGGGTTTAATATCAAGGATAC | |
| | TTATATTCATTGGGTTCGCCAGGCACCCGGAAAATGCCTGGAATGGG | |
| | TGGCCCGTATATATCCCACTAACGGTTACACTCGATATGCTGACTCTG | |
| | TAAAGGGTCGATTTACTATATCCGCTGATACTAGCAAAAACACTGCC | |
| | TACCTCCAGATGAACAGTCTGCGCGCCGAGGATACAGCAGTTTATTA | |
| | TTGTTCCCGATGGGGAGGTGACGGGTTCTATGCCATGGACTACTGGG | |
| | GTCAAGGGACACTGGTAACCGTTTCTTCTGCTAGCACCAAAGGACCT | |
| | AGTGTTTTTCCTCTTGCCCCTTCCTCAAAGTCTACCTCTGGGGGGACA | |
| | GCCGCTCTGGGCTGCCTGGTCAAGGATTATTTCCCAGAGCCTGTCACT | |
| | GTCAGTTGGAACTCTGGAGCCTTGACTTCTGGTGTTCATACATTTCCT | |
| | GCTGTCCTTCAAAGCAGCGGCTTGTACTCATTGTCTTCTGTTGTGACA | |
| | GTACCCTCAAGCAGCCTCGGCACTCAGACATACATCTGCAATGTCAA | |
| | CCACAAACCCTCAAATACAAAGGTAGATAAAAAAGTCGAACCAAAG | |
| | TCTTGTGACAAAACTCACACGTGCCCACCGTGCCCAGCACCTGAACT | |
| | CCTGGGGGGACCGTCAGTCTTCCTCTTCCCCCCAAAACCCAAGGACA | |
| | CCCTCATGATCTCCCGGACCCCTGAGGTCACATGCGTGGTGGTGGAC | |
| | GTGAGCCACGAAGACCCTGAGGTCAAGTTCAACTGGTACGTGGACGG | |
| | CGTGGAGGTGCATAATGCCAAGACAAAGCCGCGGGAGGAGCAGTAC | |
| | AACAGCACGTACCGTGTGGTCAGCGTCCTCACCGTCCTGCACCAGGA | |
| | CTGGCTGAATGGCAAGGAGTACAAGTGCAAGGTCTCCAACAAAGCCC | |
| | TCCCAGCCCCCATCGAGAAAACCATCTCCAAAGCCAAAGGGCAGCCC | |
| | CGAGAACCACAGGTGTACACCCTGCCCCCATGCCGGGAGGAGATGAC | |
| | CAAGAACCAGGTCAGCCTGTGGTGCCTGGTCAAAGGCTTCTATCCCA | |
| | GCGACATCGCCGTGGAGTGGGAGAGCAATGGGCAGCCGGAGAACAA | |
| | CTACAAGACCACGCCTCCCGTGCTGGACTCCGACGGCTCCTTCTTCCT | |
| | CTACAGCAAGCTCACCGTGGACAAGAGCAGGTGGCAGCAGGGGAAC | |
| | GTCTTCTCATGCTCCGTGATGCATGAGGCTCTGCACAACCACTACACG | |
| | CAGAAGAGCCTCTCCCTGTCTCCGGGTAAA | |
| TraL-Q100C- | GACATTCAGATGACCCAATCCCCCTCTAGCCTTTCAGCCTCCGTAGGG | 466 |
| Knob | GACAGAGTTACAATAACCTGTAGGGCTAGTCAGGACGTTAATACAGC | |
| | AGTCGCATGGTACCAGCAGAAGCCCGGTAAGGCTCCTAAGCTTTTGA | |
| | TCTACAGTGCTTCTTTCCTGTATTCTGGTGTACCTAGCCGATTCTCAG | |
| | GCTCTCGGAGTGGCACAGACTTCACTCTGACAATTTCAAGTCTCCAGC | |
| | CAGAAGATTTTGCAACCTACTACTGCCAACAACACTACACTACTCCTC | |
| | CAACCTTCGGATGTGGCACAAAAGTAGAGATTAAGCGTACGGTGGCA | |
| | GCTCCCAGCGTTTTTATCTTTCCCCCATCCGACGAGCAGCTCAAGAGT | |
| | GGCACTGCCTCTGTAGTTTGTTTGCTGAATAACTTCTATCCACGTGAA | |
| | GCAAAAGTACAGTGGAAGGTCGATAATGCCCTTCAGAGCGGTAACA | |
| | GCCAAGAAAGTGTTACCGAGCAAGATTCCAAAGATTCCACTTACAGT | |
| | CTGTCCAGCACATTGACACTGAGTAAGGCTGATTACGAAAAACACAA | |
| | GGTGTACGCATGCGAGGTGACACACCAAGGTCTTTCATCTCCTGTAA | |
| | CTAAGAGCTTTAACCGGGGAGAATGTGGTGGTGGGGGCAGCGGGGG | |
| | CGGAGGTAGTGGAGGCGGCGGTAGTGAACCAAAGAGTAGTGACAAA | |
| | ACTCACACGTGCCCACCGTGCCCAGCACCTGAACTCCTGGGGGGACC | |
| | GTCAGTCTTCCTCTTCCCCCCAAAACCCAAGGACACCCTCATGATCTC | |
| | CCGGACCCCTGAGGTCACATGCGTGGTGGTGGACGTGAGCCACGAAG | |
| | ACCCTGAGGTCAAGTTCAACTGGTACGTGGACGGCGTGGAGGTGCAT | |
| | AATGCCAAGACAAAGCCGCGGGAGGAGCAGTACAACAGCACGTACC | |
| | GTGTGGTCAGCGTCCTCACCGTCCTGCACCAGGACTGGCTGAATGGC | |
| | AAGGAGTACAAGTGCAAGGTCTCCAACAAAGCCCTCCCAGCCCCCAT | |
| | CGAGAAAACCATCTCCAAAGCCAAAGGGCAGCCCCGAGAACCACAG | |
| | GTGTACACCCTGCCCCCATGCCGGGAGGAGATGACCAAGAACCAGGT | |
| | CAGCCTGTGGTGCCTGGTCAAAGGCTTCTATCCCAGCGACATCGCCG | |
| | TGGAGTGGGAGAGCAATGGGCAGCCGGAGAACAACTACAAGACCAC | |
| | GCCTCCCGTGCTGGACTCCGACGGCTCCTTCTTCCTCTACAGCAAGCT | |
| | CACCGTGGACAAGAGCAGGTGGCAGCAGGGGAACGTCTTCTCATGCT | |
| | CCGTGATGCATGAGGCTCTGCACAACCACTACACGCAGAAGAGCCTC | |
| | TCCCTGTCTCCGGGTAAA | |
| TraL-Q100C- | GACATTCAGATGACCCAATCCCCCTCTAGCCTTTCAGCCTCCGTAGGG | 467 |
| Knob1 | GACAGAGTTACAATAACCTGTAGGGCTAGTCAGGACGTTAATACAGC | |
| | AGTCGCATGGTACCAGCAGAAGCCCGGTAAGGCTCCTAAGCTTTTGA | |
| | TCTACAGTGCTTCTTTCCTGTATTCTGGTGTACCTAGCCGATTCTCAG | |
| | GCTCTCGGAGTGGCACAGACTTCACTCTGACAATTTCAAGTCTCCAGC | |
| | CAGAAGATTTTGCAACCTACTACTGCCAACAACACTACACTACTCCTC | |
| | CAACCTTCGGATGTGGCACAAAAGTAGAGATTAAGCGTACGGTGGCA | |
| | GCTCCCAGCGTTTTTATCTTTCCCCCATCCGACGAGCAGCTCAAGAGT | |
| | GGCACTGCCTCTGTAGTTTGTTTGCTGAATAACTTCTATCCACGTGAA | |
| | GCAAAAGTACAGTGGAAGGTCGATAATGCCCTTCAGAGCGGTAACA | |
| | GCCAAGAAAGTGTTACCGAGCAAGATTCCAAAGATTCCACTTACAGT | |
| | CTGTCCAGCACATTGACACTGAGTAAGGCTGATTACGAAAAACACAA | |
| | GGTGTACGCATGCGAGGTGACACACCAAGGTCTTTCATCTCCTGTAA | |
| | CTAAGAGCTTTAACCGGGGAGAATGTGGTGGTGGGGGCAGCGGGGG | |
| | CGGAGGTAGTGAACCAAAGAGTAGTGACAAAACTCACACGTGCCCA | |
| | CCGTGCCCAGCACCTGAACTCCTGGGGGGACCGTCAGTCTTCCTCTTC | |
| | CCCCCAAAACCCAAGGACACCCTCATGATCTCCCGGACCCCTGAGGT | |
| | CACATGCGTGGTGGTGGACGTGAGCCACGAAGACCCTGAGGTCAAGT | |
| | TCAACTGGTACGTGGACGGCGTGGAGGTGCATAATGCCAAGACAAA | |
| | GCCGCGGGAGGAGCAGTACAACAGCACGTACCGTGTGGTCAGCGTCC | |
| | TCACCGTCCTGCACCAGGACTGGCTGAATGGCAAGGAGTACAAGTGC | |
| | AAGGTCTCCAACAAAGCCCTCCCAGCCCCCATCGAGAAAACCATCTC | |
| | CAAAGCCAAAGGGCAGCCCCGAGAACCACAGGTGTACACCCTGCCC | |
| | CCATGCCGGGAGGAGATGACCAAGAACCAGGTCAGCCTGTGGTGCCT | |
| | GGTCAAAGGCTTCTATCCCAGCGACATCGCCGTGGAGTGGGAGAGCA | |
| | ATGGGCAGCCGGAGAACAACTACAAGACCACGCCTCCCGTGCTGGAC | |
| | TCCGACGGCTCCTTCTTCCTCTACAGCAAGCTCACCGTGGACAAGAG | |
| | CAGGTGGCAGCAGGGGAACGTCTTCTCATGCTCCGTGATGCATGAGG | |
| | CTCTGCACAACCACTACACGCAGAAGAGCCTCTCCCTGTCTCCGGGT | |
| | AAA | |
| TraL-Q100C- | GACATTCAGATGACCCAATCCCCCTCTAGCCTTTCAGCCTCCGTAGGG | 468 |
| Knob2 | GACAGAGTTACAATAACCTGTAGGGCTAGTCAGGACGTTAATACAGC | |
| | AGTCGCATGGTACCAGCAGAAGCCCGGTAAGGCTCCTAAGCTTTTGA | |
| | TCTACAGTGCTTCTTTCCTGTATTCTGGTGTACCTAGCCGATTCTCAG | |
| | GCTCTCGGAGTGGCACAGACTTCACTCTGACAATTTCAAGTCTCCAGC | |
| | CAGAAGATTTTGCAACCTACTACTGCCAACAACACTACACTACTCCTC | |
| | CAACCTTCGGATGTGGCACAAAAGTAGAGATTAAGCGTACGGTGGCA | |
| | GCTCCCAGCGTTTTTATCTTTCCCCCATCCGACGAGCAGCTCAAGAGT | |
| | GGCACTGCCTCTGTAGTTTGTTTGCTGAATAACTTCTATCCACGTGAA | |
| | GCAAAAGTACAGTGGAAGGTCGATAATGCCCTTCAGAGCGGTAACA | |
| | GCCAAGAAAGTGTTACCGAGCAAGATTCCAAAGATTCCACTTACAGT | |
| | CTGTCCAGCACATTGACACTGAGTAAGGCTGATTACGAAAAACACAA | |
| | GGTGTACGCATGCGAGGTGACACACCAAGGTCTTTCATCTCCTGTAA | |
| | CTAAGAGCTTTAACCGGGGAGAATGTGGTGGTGGGGGCAGCGAACC | |
| | AAAGAGTAGTGACAAAACTCACACGTGCCCACCGTGCCCAGCACCTG | |
| | AACTCCTGGGGGGACCGTCAGTCTTCCTCTTCCCCCCAAAACCCAAG | |
| | GACACCCTCATGATCTCCCGGACCCCTGAGGTCACATGCGTGGTGGT | |
| | GGACGTGAGCCACGAAGACCCTGAGGTCAAGTTCAACTGGTACGTGG | |
| | ACGGCGTGGAGGTGCATAATGCCAAGACAAAGCCGCGGGAGGAGCA | |
| | GTACAACAGCACGTACCGTGTGGTCAGCGTCCTCACCGTCCTGCACC | |
| | AGGACTGGCTGAATGGCAAGGAGTACAAGTGCAAGGTCTCCAACAA | |
| | AGCCCTCCCAGCCCCCATCGAGAAAACCATCTCCAAAGCCAAAGGGC | |
| | AGCCCCGAGAACCACAGGTGTACACCCTGCCCCCATGCCGGGAGGAG | |
| | ATGACCAAGAACCAGGTCAGCCTGTGGTGCCTGGTCAAAGGCTTCTA | |
| | TCCCAGCGACATCGCCGTGGAGTGGGAGAGCAATGGGCAGCCGGAG | |
| | AACAACTACAAGACCACGCCTCCCGTGCTGGACTCCGACGGCTCCTT | |
| | CTTCCTCTACAGCAAGCTCACCGTGGACAAGAGCAGGTGGCAGCAGG | |
| | GGAACGTCTTCTCATGCTCCGTGATGCATGAGGCTCTGCACAACCACT | |
| | ACACGCAGAAGAGCCTCTCCCTGTCTCCGGGTAAA | |
| TraL-Q100C- | GACATTCAGATGACCCAATCCCCCTCTAGCCTTTCAGCCTCCGTAGGG | 469 |
| Knob3 | GACAGAGTTACAATAACCTGTAGGGCTAGTCAGGACGTTAATACAGC | |
| | AGTCGCATGGTACCAGCAGAAGCCCGGTAAGGCTCCTAAGCTTTTGA | |
| | TCTACAGTGCTTCTTTCCTGTATTCTGGTGTACCTAGCCGATTCTCAG | |
| | GCTCTCGGAGTGGCACAGACTTCACTCTGACAATTTCAAGTCTCCAGC | |
| | CAGAAGATTTTGCAACCTACTACTGCCAACAACACTACACTACTCCTC | |
| | CAACCTTCGGATGTGGCACAAAAGTAGAGATTAAGCGTACGGTGGCA | |
| | GCTCCCAGCGTTTTTATCTTTCCCCCATCCGACGAGCAGCTCAAGAGT | |
| | GGCACTGCCTCTGTAGTTTGTTTGCTGAATAACTTCTATCCACGTGAA | |
| | GCAAAAGTACAGTGGAAGGTCGATAATGCCCTTCAGAGCGGTAACA | |
| | GCCAAGAAAGTGTTACCGAGCAAGATTCCAAAGATTCCACTTACAGT | |
| | CTGTCCAGCACATTGACACTGAGTAAGGCTGATTACGAAAAACACAA | |
| | GGTGTACGCATGCGAGGTGACACACCAAGGTCTTTCATCTCCTGTAA | |
| | CTAAGAGCTTTAACCGGGGAGAATGTGAACCAAAGAGTAGTGACAA | |
| | AACTCACACGTGCCCACCGTGCCCAGCACCTGAACTCCTGGGGGGAC | |
| | CGTCAGTCTTCCTCTTCCCCCCAAAACCCAAGGACACCCTCATGATCT | |
| | CCCGGACCCCTGAGGTCACATGCGTGGTGGTGGACGTGAGCCACGAA | |
| | GACCCTGAGGTCAAGTTCAACTGGTACGTGGACGGCGTGGAGGTGCA | |
| | TAATGCCAAGACAAAGCCGCGGGAGGAGCAGTACAACAGCACGTAC | |
| | CGTGTGGTCAGCGTCCTCACCGTCCTGCACCAGGACTGGCTGAATGG | |
| | CAAGGAGTACAAGTGCAAGGTCTCCAACAAAGCCCTCCCAGCCCCCA | |
| | TCGAGAAAACCATCTCCAAAGCCAAAGGGCAGCCCCGAGAACCACA | |
| | GGTGTACACCCTGCCCCCATGCCGGGAGGAGATGACCAAGAACCAG | |
| | GTCAGCCTGTGGTGCCTGGTCAAAGGCTTCTATCCCAGCGACATCGC | |
| | CGTGGAGTGGGAGAGCAATGGGCAGCCGGAGAACAACTACAAGACC | |
| | ACGCCTCCCGTGCTGGACTCCGACGGCTCCTTCTTCCTCTACAGCAAG | |
| | CTCACCGTGGACAAGAGCAGGTGGCAGCAGGGGAACGTCTTCTCATG | |
| | CTCCGTGATGCATGAGGCTCTGCACAACCACTACACGCAGAAGAGCC | |
| | TCTCCCTGTCTCCGGGTAAA | |

[0316] Table 9 below shows the polypeptide sequences of the heavy chain variable region (VH) and light chain variable region (VL) of H01. Table 10 below shows the nucleotide sequences of the heavy chain variable region (VH) and light chain variable region (VL) of H01.

TABLE 9

| Name | Sequence | SEQ ID NO |
|---|---|---|
| H01 | EVQLVESGGGLVQPGGSLRLSCAASGFNIKDTYI | 19 |
| VH | HWVRQAPGKCLEWVARIYPTNGYTRYADSVKGRF | |
| | TISADTSKNTAYLQMNSLRAEDTAVYYCSRWGGD | |
| | GFYAMDYWGQGTLVTVSS | |
| H01 | DIQMTQSPSSLSASVGDRVTITCRASQDVNTAVA | 20 |
| VL | WYQQKPGKAPKLLIYSASFLYSGVPSRFSGSRSG | |
| | TDFTLTISSLQPEDFATYYCQQHYTTPPTFGCGT | |
| | KVEIK | |

TABLE 10

| Name | Sequence | SEQ ID NO |
|---|---|---|
| H01VH | GAAGTTCAACTTGTGGAGTCTGGAGGCGGTTTGGTACAACCTGGAG | 470 |
| | GTTCACTTCGTTTGTCATGTGCTGCCTCTGGGTTTAATATCAAGGAT | |
| | ACTTATATTCATTGGGTTCGCCAGGCACCCGGAAAATGCCTGGAAT | |
| | GGGTGGCCCGTATATATCCCACTAACGGTTACACTCGATATGCTGA | |
| | CTCTGTAAAGGGTCGATTTACTATATCCGCTGATACTAGCAAAAAC | |
| | ACTGCCTACCTCCAGATGAACAGTCTGCGCGCCGAGGATACAGCAG | |
| | TTTATTATTGTTCCCGATGGGGAGGTGACGGGTTCTATGCCATGGAC | |
| | TACTGGGGTCAAGGGACACTGGTAACCGTTTCTTCT | |
| H01VL | GACATTCAGATGACCCAATCCCCCTCTAGCCTTTCAGCCTCCGTAGG | 471 |
| | GGACAGAGTTACAATAACCTGTAGGGCTAGTCAGGACGTTAATACA | |
| | GCAGTCGCATGGTACCAGCAGAAGCCCGGTAAGGCTCCTAAGCTTT | |
| | TGATCTACAGTGCTTCTTTCCTGTATTCTGGTGTACCTAGCCGATTC | |
| | TCAGGCTCTCGGAGTGGCACAGACTTCACTCTGACAATTTCAAGTCT | |
| | CCAGCCAGAAGATTTTGCAACCTACTACTGCCAACAACACTACACT | |
| | ACTCCTCCAACCTTCGGATGTGGCACAAAAGTAGAGATTAAG | |

[0317] Table 11 below shows the H01 heavy chain and light chain CDR sequences.

TABLE 11

| Name | CDR region | Sequence | SEQ ID NO |
|---|---|---|---|
| H01 VH | CDR-H1 | DTYIH | 21 |
| | CDR-H2 | RIYPTNGYTRYADSVKG | 22 |
| | CDR-H3 | WGGDGFYAMDY | 23 |
| H01 VL | CDR-L1 | RASQDVNTAVA | 24 |
| | CDR-L2 | SASFLYS | 25 |
| | CDR-L3 | QQHYTTPPT | 26 |

### Example 2. Preparation of a Novel Antibody with Two Fc Domains Using Pertuzumab as a Template

[0318] M3 is characterized by a (trastuzumab Fab)-(Fc)₂ structure with mutations of VH G44C and VL Q100C, hereinafter referred to as H01. Similarly, based on the VH and VL regions of pertuzumab (SEQ ID NOs: 27 and 28), the (pertuzumab Fab)-(Fc)₂ structure with the mutations VH G44C and VL Q100C is hereinafter referred to as P01. For P01, expression vectors containing the sequences corresponding to Fc-Hole (SEQ ID NO: 7), PerH-G44C-Knob (SEQ ID NO: 29), and PerL-Q100C-Knob (SEQ ID NO: 30) were co-transfected into EXPICHO-S™ (Gibco, A29127), and purification and analysis were performed in the same manner as described in Example 1.

TABLE 12

| | | SEQ |
|---|---|---|
| Name | Sequence | ID NO |
| Pertuzumab | EVQLVESGGGLVQPGGSLRLSCAASGFTFTDYTMDWVRQAPGKGLE | 27 |
| VH domain | WVADVNPNSGGSIYNQRFKGRFTLSVDRSKNTLYLQMNSLRAEDTAV | |
| | YYCARNLGPSFYFDYWGQGTLVTVSS | |
| Pertuzumab | DIQMTQSPSSLSASVGDRVTITCKASQDVSIGVAWYQQKPGKAPKLLIY | 28 |
| VL domain | SASYRYTGVPSRFSGSGSGTDFTLTISSLQPEDFATYYCQQYYIYPYTFG | |
| | QGTKVEIK | |
| PerH-G44C- | EVQLVESGGGLVQPGGSLRLSCAASGFTFTDYTMDWVRQAPGKCLEW | 29 |
| Knob | VADVNPNSGGSIYNQRFKGRFTLSVDRSKNTLYLQMNSLRAEDTAVY | |
| | YCARNLGPSFYFDYWGQGTLVTVSSASTKGPSVFPLAPSSKSTSGGTA | |
| | ALGCLVKDYFPEPVTVSWNSGALTSGVHTFPAVLQSSGLYSLSSVVTV | |
| | PSSSLGTQTYICNVNHKPSNTKVDKKVEPKSCDKTHTCPPCPAPELLGG | |
| | PSVFLFPPKPKDTLMISRTPEVTCVVVDVSHEDPEVKFNWYVDGVEVH | |
| | NAKTKPREEQYNSTYRVVSVLTVLHQDWLNGKEYKCKVSNKALPAPI | |
| | EKTISKAKGQPREPQVYTLPPCREEMTKNQVSLWCLVKGFYPSDIAVE | |
| | WESNGQPENNYKTTPPVLDSDGSFFLYSKLTVDKSRWQQGNVFSCSV | |
| | MHEALHNHYTQKSLSLSPGK | |
| PerL-Q100C- | DIQMTQSPSSLSASVGDRVTITCKASQDVSIGVAWYQQKPGKAPKLLIY | 30 |
| Knob | SASYRYTGVPSRFSGSGSGTDFTLTISSLQPEDFATYYCQQYYIYPYTFG | |
| | CGTKVEIKRTVAAPSVFIFPPSDEQLKSGTASVVCLLNNFYPREAKVQW | |
| | KVDNALQSGNSQESVTEQDSKDSTYSLSSTLTLSKADYEKHKVYACEV | |
| | THQGLSSPVTKSFNRGECGGGGSGGGGSGGGGSEPKSSDKTHTCPPCP | |
| | APELLGGPSVFLFPPKPKDTLMISRTPEVTCVVVDVSHEDPEVKFNWY | |
| | VDGVEVHNAKTKPREEQYNSTYRVVSVLTVLHQDWLNGKEYKCKVS | |
| | NKALPAPIEKTISKAKGQPREPQVYTLPPCREEMTKNQVSLWCLVKGF | |
| | YPSDIAVEWESNGQPENNYKTTPPVLDSDGSFFLYSKLTVDKSRWQQG | |
| | NVFSCSVMHEALHNHYTQKSLSLSPGK | |

TABLE 13

| Name | Sequence | SEQ ID NO |
|---|---|---|
| Pertuzumab VH | GAAGTGCAACTGGTGGAGTCTGGTGGTGGATTGGTGCAGCCAGGCG | 414 |
| domain | GTTCTCTGCGACTTAGTTGTGCAGCCTCCGGCTTTACCTTCACTGAT | |
| | TATACAATGGACTGGGTTCGGCAGGCACCCGGTAAGGGGCTTGAGT | |
| | GGGTCGCCGACGTCAATCCTAATTCAGGGGGAAGTATTTATAACCA | |
| | AAGGTTCAAGGGTCGATTTACATTGTCCGTAGATCGTAGTAAAAAT | |
| | ACCCTCTACCTTCAAATGAACTCCCTGAGGGCAGAGGATACCGCAG | |
| | TCTACTACTGCGCTCGTAACCTGGGGCCTAGTTTTTATTTCGATTAT | |
| | TGGGGCCAAGGCACATTGGTAACTGTGTCTTCA | |
| Pertuzumab VL | GATATACAAATGACACAATCTCCTAGTTCATTGAGTGCCTCAGTCG | 415 |
| domain | GCGACCGAGTCACTATAACTTGTAAAGCAAGCCAAGATGTTAGCAT | |
| | TGGCGTAGCTTGGTATCAGCAGAAACCTGGAAAAGCACCAAAACTG | |
| | CTTATCTACTCCGCTAGTTACCGTTACACCGGAGTTCCCTCAAGGTT | |
| | TTCTGGCAGCGGAAGTGGGACTGACTTCACTCTGACTATTTCTTCAC | |
| | TTCAGCCAGAAGACTTCGCTACTTATTACTGTCAGCAGTACTATATC | |
| | TATCCCTATACATTTGGACAAGGAACCAAAGTTGAGATTAAA | |
| PerH-G44C-Knob | GAAGTACAGTTGGTGGAGTCTGGTGGAGGTCTTGTACAACCTGGCG | 472 |
| | GGAGTTTGCGGCTTTCCTGCGCTGCAAGCGGGTTTACCTTCACCGAT | |
| | TATACCATGGATTGGGTACGCCAAGCCCCTGGTAAGTGCCTTGAGT | |
| | GGGTTGCCGATGTAAACCCTAATTCCGGAGGAAGTATCTATAATCA | |
| | ACGCTTCAAGGGCCGATTCACTCTGAGTGTGGATCGAAGCAAGAAC | |
| | ACCTTGTACTTGCAGATGAATTCCTTGCGGGCTGAAGACACAGCCG | |
| | TCTATTACTGCGCCCGAAATTTGGGGCCTTCATTCTATTTTGACTAT | |
| | TGGGGTCAGGGAACTCTGGTAACTGTTTCAAGTGCTAGCACCAAAG | |
| | GACCTAGTGTTTTTCCTCTTGCCCCTTCCTCAAAGTCTACCTCTGGG | |
| | GGGACAGCCGCTCTGGGCTGCCTGGTCAAGGATTATTTCCCAGAGC | |
| | CTGTCACTGTCAGTTGGAACTCTGGAGCCTTGACTTCTGGTGTTCAT | |
| | ACATTTCCTGCTGTCCTTCAAAGCAGCGGCTTGTACTCATTGTCTTC | |
| | TGTTGTGACAGTACCCTCAAGCAGCCTCGGCACTCAGACATACATC | |
| | TGCAATGTCAACCACAAACCCTCAAATACAAAGGTAGATAAAAAA | |
| | GTCGAACCAAAGTCTTGTGACAAAACTCACACGTGCCCACCGTGCC | |
| | CAGCACCTGAACTCCTGGGGGGACCGTCAGTCTTCCTCTTCCCCCCA | |
| | AAACCCAAGGACACCCTCATGATCTCCCGGACCCCTGAGGTCACAT | |
| | GCGTGGTGGTGGACGTGAGCCACGAAGACCCTGAGGTCAAGTTCAA | |
| | CTGGTACGTGGACGGCGTGGAGGTGCATAATGCCAAGACAAAGCC | |
| | GCGGGAGGAGCAGTACAACAGCACGTACCGTGTGGTCAGCGTCCTC | |
| | ACCGTCCTGCACCAGGACTGGCTGAATGGCAAGGAGTACAAGTGCA | |
| | AGGTCTCCAACAAAGCCCTCCCAGCCCCCATCGAGAAAACCATCTC | |
| | CAAAGCCAAAGGGCAGCCCCGAGAACCACAGGTGTACACCCTGCC | |
| | CCCATGCCGGGAGGAGATGACCAAGAACCAGGTCAGCCTGTGGTG | |
| | CCTGGTCAAAGGCTTCTATCCCAGCGACATCGCCGTGGAGTGGGAG | |
| | AGCAATGGGCAGCCGGAGAACAACTACAAGACCACGCCTCCCGTG | |
| | CTGGACTCCGACGGCTCCTTCTTCCTCTACAGCAAGCTCACCGTGGA | |
| | CAAGAGCAGGTGGCAGCAGGGGAACGTCTTCTCATGCTCCGTGATG | |
| | CATGAGGCTCTGCACAACCACTACACGCAGAAGAGCCTCTCCCTGT | |
| | CTCCGGGTAAA | |
| PerL-Q100C- | GATATTCAAATGACCCAAAGTCCAAGTTCCCTTTCAGCATCTGTCGG | 473 |
| Knob | TGATCGAGTCACTATAACTTGTAAGGCCAGCCAAGACGTTAGCATA | |
| | GGAGTAGCATGGTACCAACAAAAGCCTGGGAAGGCTCCCAAACTTC | |
| | TCATTTATTCTGCTTCCTACCGATATACTGGTGTCCCAAGTAGATTT | |
| | TCTGGCAGCGGATCTGGAACTGATTTTACATTGACTATCAGCTCCCT | |
| | CCAGCCTGAGGACTTCGCTACTTATTACTGCCAACAGTACTACATTT | |
| | ATCCCTATACATTCGGTTGTGGGACCAAAGTAGAGATCAAACGTAC | |
| | GGTGGCAGCTCCCAGCGTTTTTATCTTTCCCCCATCCGACGAGCAGC | |
| | TCAAGAGTGGCACTGCCTCTGTAGTTTGTTTGCTGAATAACTTCTAT | |
| | CCACGTGAAGCAAAAGTACAGTGGAAGGTCGATAATGCCCTTCAGA | |
| | GCGGTAACAGCCAAGAAAGTGTTACCGAGCAAGATTCCAAAGATTC | |
| | CACTTACAGTCTGTCCAGCACATTGACACTGAGTAAGGCTGATTAC | |
| | GAAAAACACAAGGTGTACGCATGCGAGGTGACACACCAAGGTCTTT | |
| | CATCTCCTGTAACTAAGAGCTTTAACCGGGGAGAATGTGGTGGTGG | |
| | GGGCAGCGGGGGCGGAGGTAGTGGAGGCGGCGGTAGTGAACCAAA | |
| | GAGTAGTGACAAAACTCACACGTGCCCACCGTGCCCAGCACCTGAA | |
| | CTCCTGGGGGGACCGTCAGTCTTCCTCTTCCCCCCAAAACCCAAGG | |
| | ACACCCTCATGATCTCCCGGACCCCTGAGGTCACATGCGTGGTGGT | |
| | GGACGTGAGCCACGAAGACCCTGAGGTCAAGTTCAACTGGTACGTG | |
| | GACGGCGTGGAGGTGCATAATGCCAAGACAAAGCCGCGGGAGGAG | |
| | CAGTACAACAGCACGTACCGTGTGGTCAGCGTCCTCACCGTCCTGC | |
| | ACCAGGACTGGCTGAATGGCAAGGAGTACAAGTGCAAGGTCTCCA | |
| | ACAAAGCCCTCCCAGCCCCCATCGAGAAAACCATCTCCAAAGCCAA | |
| | AGGGCAGCCCCGAGAACCACAGGTGTACACCCTGCCCCCATGCCGG | |
| | GAGGAGATGACCAAGAACCAGGTCAGCCTGTGGTGCCTGGTCAAA | |
| | GGCTTCTATCCCAGCGACATCGCCGTGGAGTGGGAGAGCAATGGGC | |
| | AGCCGGAGAACAACTACAAGACCACGCCTCCCGTGCTGGACTCCGA | |
| | CGGCTCCTTCTTCCTCTACAGCAAGCTCACCGTGGACAAGAGCAGG | |
| | TGGCAGCAGGGGAACGTCTTCTCATGCTCCGTGATGCATGAGGCTC | |
| | TGCACAACCACTACACGCAGAAGAGCCTCTCCCTGTCTCCGGGTAA | |
| | A | |

[0319] Table 14 below shows the polypeptide sequences of the heavy chain variable region (VH) and light chain variable region (VL) of P01. Table 15 below shows the nucleotide sequences of the heavy chain variable region (VH) and light chain variable region (VL) of P01.

TABLE 14

| Name | Sequence | SEQ ID NO |
|---|---|---|
| P01 VH | EVQLVESGGGLVQPGGSLRLSCAASGFTFTDYTMDWVRQAPGKCLE | 31 |
| | WVADVNPNSGGSIYNQRFKGRFTLSVDRSKNTLYLQMNSLRAEDTA | |
| | VYYCARNLGPSFYFDYWGQGTLVTVSS | |
| P01 VL | DIQMTQSPSSLSASVGDRVTITCKASQDVSIGVAWYQQKPGKAPKLLI | 32 |
| | YSASYRYTGVPSRFSGSGSGTDFTLTISSLQPEDFATYYCQQYYIYPYT | |
| | FGCGTKVEIK | |

TABLE 15

| Name | Sequence | SEQ ID NO |
|---|---|---|
| P01 VH | GAAGTACAGTTGGTGGAGTCTGGTGGAGGTCTTGTACAACCTGGC | 474 |
| | GGGAGTTTGCGGCTTTCCTGCGCTGCAAGCGGGTTTACCTTCACCG | |
| | ATTATACCATGGATTGGGTACGCCAAGCCCCTGGTAAGTGCCTTGA | |
| | GTGGGTTGCCGATGTAAACCCTAATTCCGGAGGAAGTATCTATAAT | |
| | CAACGCTTCAAGGGCCGATTCACTCTGAGTGTGGATCGAAGCAAG | |
| | AACACCTTGTACTTGCAGATGAATTCCTTGCGGGCTGAAGACACAG | |
| | CCGTCTATTACTGCGCCCGAAATTTGGGGCCTTCATTCTATTTTGA | |
| | CTATTGGGGTCAGGGAACTCTGGTAACTGTTTCAAGT | |
| P01 VL | GATATTCAAATGACCCAAAGTCCAAGTTCCCTTTCAGCATCTGTCG | 475 |
| | GTGATCGAGTCACTATAACTTGTAAGGCCAGCCAAGACGTTAGCA | |
| | TAGGAGTAGCATGGTACCAACAAAAGCCTGGGAAGGCTCCCAAACT | |
| | TCTCATTTATTCTGCTTCCTACCGATATACTGGTGTCCCAAGTAGA | |
| | TTTTCTGGCAGCGGATCTGGAACTGATTTTACATTGACTATCAGCT | |
| | CCCTCCAGCCTGAGGACTTCGCTACTTATTACTGCCAACAGTACTA | |
| | CATTTATCCCTATACATTCGGTTGTGGGACCAAAGTAGAGATCAAA | |

[0320] Table 16 below shows CDR sequences in heavy and light chains of the P01.

TABLE 16

| Name | | Sequence | SEQ ID NO |
|---|---|---|---|
| P01 VH | CDR-H1 | DYTMD | 33 |
| | CDR-H2 | DVNPNSGGSIYNQRFKG | 34 |
| | CDR-H3 | NLGPSFYFDY | 35 |
| P01 VL | CDR-L1 | KASQDVSIGVA | 36 |
| | CDR-L2 | SASYRYT | 37 |
| | CDR-L3 | QQYYIYPYT | 38 |

### Example 3. Analysis of H01 and P01 Byproducts Through Papain Digestion

[0321] Papain recognizes specific sequences in the hinge region and induces antibody digestion. In the case of the Fab-(Fc)₂ structure, when papain digestion is performed, it is cleaved into a Fab portion of approximately 49.3 kDa and two Fc domains of approximately 50.4 kDa (FIG. 8a). However, if abnormal disulfide bonds are formed in the hinge region, unwanted inter-chain disulfide bond byproducts could be observed (FIG. 8b). In this case, a Fab fragment of approximately 49.3 kDa and an abnormal (Fc)₂ product of approximately 100.7 kDa could be observed (FIG. 8b).

[0322] To verify this, papain digestion of H01 and P01 was performed. Papain (Sigma, P3125) was used by diluting it to 0.1 mg/mL in digestion buffer (20 mM EDTA+10 mM Cys-HCl in PBS pH 7.4). 200 μg of H01 and P01 were digested at 37° C. for 2 hours, and then SDS-PAGE was performed. As a result of SDS-PAGE performed under non-reducing conditions, abnormal (Fc)₂ at about 100 kDa was not identified (FIGS. 8c and 8d).

### Example 4. Analysis of Physical Properties of H01 wt

[0323] In H01, four Fc monomers are assembled into two Fc dimers due to knob-into-hole mutations, resulting in a structure as shown in FIG. 6a. To analyze the effect of the knob-into-hole mutations on the formation of H01 structure, the Fc hole monomer polypeptide (SEQ ID NO: 7) was substituted with a polypeptide (SEQ ID NO: 39) corresponding to the wild type IgG1 Fc monomer (Table 17). The two knob polypeptides (SEQ ID NOs: 14 and 15) constituting H01 were also substituted with polypeptides (SEQ ID NOs: 40 and 41) corresponding to the wild type IgG1 Fc monomer (Table 17). This novel antibody format consisting of two wtFc polypeptides (SEQ ID NO: 39), one TraH-G44C-wtFc polypeptide (SEQ ID NO: 40), and one TraL-Q100C-wtFc polypeptide (SEQ ID NO: 41) is referred to as H01 wt (FIG. 9).

[0324] Expression vectors containing sequences corresponding to wtFc (SEQ ID NO: 39), TraH-G44C-wtFc (SEQ ID NO: 40), and TraL-Q100C-wtFc (SEQ ID NO: 41) were co-transfected into EXPICHO-S™ (Gibco, A29127), and purification and analysis were performed in the same manner as described in Example 1. SDS-PAGE analysis under non-reducing conditions (NR) identified a small amount of H01 wt at about 150 kDa, and most of H01 wt were expressed as abnormally structured byproducts (FIG. 9). In the case of H01, which has knob-into-hole mutations in the Fc region, each polypeptide was efficiently assembled into a product that is identified at about 150 kDa (FIG. 9).

TABLE 17

| Name | Sequence | SEQ ID NO |
|---|---|---|
| wtFc | DKTHTCPPCPAPELLGGPSVFLFPPKPKDTLMISRTPEVTCVVVDVSHE | 39 |
| | DPEVKFNWYVDGVEVHNAKTKPREEQYNSTYRVVSVLTVLHQDWL | |
| | NGKEYKCKVSNKALPAPIEKTISKAKGQPREPQVYTLPPSREEMTKNQ | |
| | VSLTCLVKGFYPSDIAVEWESNGQPENNYKTTPPVLDSDGSFFLYSKL | |
| | TVDKSRWQQGNVFSCSVMHEALHNHYTQKSLSLSPGK | |
| TraH- | EVQLVESGGGLVQPGGSLRLSCAASGFNIKDTYIHWVRQAPGKCLEW | 40 |
| G44C- | VARIYPTNGYTRYADSVKGRFTISADTSKNTAYLQMNSLRAEDTAVY | |
| wtFc | YCSRWGGDGFYAMDYWGQGTLVTVSSASTKGPSVFPLAPSSKSTSG | |
| | GTAALGCLVKDYFPEPVTVSWNSGALTSGVHTFPAVLQSSGLYSLSS | |
| | VVTVPSSSLGTQTYICNVNHKPSNTKVDKKVEPKSCDKTHTCPPCPAP | |
| | ELLGGPSVFLFPPKPKDTLMISRTPEVTCVVVDVSHEDPEVKFNWYVD | |
| | GVEVHNAKTKPREEQYNSTYRVVSVLTVLHQDWLNGKEYKCKVSN | |
| | KALPAPIEKTISKAKGQPREPQVYTLPPSREEMTKNQVSLTCLVKGFY | |
| | PSDIAVEWESNGQPENNYKTTPPVLDSDGSFFLYSKLTVDKSRWQQG | |
| | NVFSCSVMHEALHNHYTQKSLSLSPGK | |
| TraL- | DIQMTQSPSSLSASVGDRVTITCRASQDVNTAVAWYQQKPGKAPKLL | 41 |
| Q100C- | IYSASFLYSGVPSRFSGSRSGTDFTLTISSLQPEDFATYYCQQHYTTPPT | |
| wtFc | FGCGTKVEIKRTVAAPSVFIFPPSDEQLKSGTASVVCLLNNFYPREAKV | |
| | QWKVDNALQSGNSQESVTEQDSKDSTYSLSSTLTLSKADYEKHKVY | |
| | ACEVTHQGLSSPVTKSFNRGECGGGGSGGGGSGGGGSEPKSSDKTHT | |
| | CPPCPAPELLGGPSVFLFPPKPKDTLMISRTPEVTCVVVDVSHEDPEVK | |
| | FNWYVDGVEVHNAKTKPREEQYNSTYRVVSVLTVLHQDWLNGKEY | |
| | KCKVSNKALPAPIEKTISKAKGQPREPQVYTLPPSREEMTKNQVSLTC | |
| | LVKGFYPSDIAVEWESNGQPENNYKTTPPVLDSDGSFFLYSKLTVDKS | |
| | RWQQGNVFSCSVMHEALHNHYTQKSLSLSPGK | |

[0325] Table 18 below shows the nucleotide sequences encoding wtFc, TraH-G44C-wtFc, and TraL-Q100C-wtFc of H011 wt.

TABLE 18

| Name | Sequence | SEQ ID NO |
|---|---|---|
| wtFc | GACAAAACTCACACATGCCCACCGTGCCCAGCACCTGAACTCCTG | 476 |
| | GGGGGACCGTCAGTCTTCCTCTTCCCCCCAAAACCCAAGGACACCC | |
| | TCATGATCTCCCGGACCCCTGAGGTCACATGCGTGGTGGTGGACGT | |
| | GAGCCACGAAGACCCTGAGGTCAAGTTCAACTGGTACGTGGACGG | |
| | CGTGGAGGTGCATAATGCCAAGACAAAGCCGCGGGAGGAGCAGT | |
| | ACAACAGCACGTACCGTGTGGTCAGCGTCCTCACCGTCCTGCACCA | |
| | GGACTGGCTGAATGGCAAGGAGTACAAGTGCAAGGTCTCCAACAA | |
| | AGCCCTCCCAGCCCCCATCGAGAAAACCATCTCCAAAGCCAAAGG | |
| | GCAGCCCCGAGAACCACAGGTGTACACCCTGCCCCCATCCCGGGA | |
| | GGAGATGACCAAGAACCAGGTCAGCCTGACGTGCCTGGTCAAAGG | |
| | CTTCTATCCCAGCGACATCGCCGTGGAGTGGGAGAGCAATGGGCA | |
| | GCCGGAGAACAACTACAAGACCACGCCTCCCGTGCTGGACTCCGA | |
| | CGGCTCCTTCTTCCTCTACAGCAAGCTCACCGTGGACAAGAGCAGG | |
| | TGGCAGCAGGGGAACGTCTTCTCATGCTCCGTGATGCATGAGGCTC | |
| | TGCACAACCACTACACGCAGAAGAGCCTCTCCCTGTCTCCGGGTAA | |
| | A | |
| TraH- | GAAGTTCAACTTGTGGAGTCTGGAGGCGGTTTGGTACAACCTGGA | 477 |
| G44C- | GGTTCACTTCGTTTGTCATGTGCTGCCTCTGGGTTTAATATCAAGG | |
| wtFc | ATACTTATATTCATTGGGTTCGCCAGGCACCCGGAAAATGCCTGGA | |
| | ATGGGTGGCCCGTATATATCCCACTAACGGTTACACTCGATATGCT | |
| | GACTCTGTAAAGGGTCGATTTACTATATCCGCTGATACTAGCAAAA | |
| | ACACTGCCTACCTCCAGATGAACAGTCTGCGCGCCGAGGATACAG | |
| | CAGTTTATTATTGTTCCCGATGGGGAGGTGACGGGTTCTATGCCAT | |
| | GGACTACTGGGGTCAAGGGACACTGGTAACCGTTTCTTCTGCTAGC | |
| | ACCAAAGGACCTAGTGTTTTTCCTCTTGCCCCTTCCTCAAAGTCTAC | |
| | CTCTGGGGGGACAGCCGCTCTGGGCTGCCTGGTCAAGGATTATTTC | |
| | CCAGAGCCTGTCACTGTCAGTTGGAACTCTGGAGCCTTGACTTCTG | |
| | GTGTTCATACATTTCCTGCTGTCCTTCAAAGCAGCGGCTTGTACTC | |
| | ATTGTCTTCTGTTGTGACAGTACCCTCAAGCAGCCTCGGCACTCAG | |
| | ACATACATCTGCAATGTCAACCACAAACCCTCAAATACAAAGGTA | |
| | GATAAAAAAGTCGAACCAAAGTCTTGTGACAAAACTCACACGTGC | |
| | CCACCGTGCCCAGCACCTGAACTCCTGGGGGGACCGTCAGTCTTCC | |
| | TCTTCCCCCCAAAACCCAAGGACACCCTCATGATCTCCCGGACCCC | |
| | TGAGGTCACATGCGTGGTGGTGGACGTGAGCCACGAAGACCCTGA | |
| | GGTCAAGTTCAACTGGTACGTGGACGGCGTGGAGGTGCATAATGC | |
| | CAAGACAAAGCCGCGGGAGGAGCAGTACAACAGCACGTACCGTGT | |
| | GGTCAGCGTCCTCACCGTCCTGCACCAGGACTGGCTGAATGGCAA | |
| | GGAGTACAAGTGCAAGGTCTCCAACAAAGCCCTCCCAGCCCCCAT | |
| | CGAGAAAACCATCTCCAAAGCCAAAGGGCAGCCCCGAGAACCACA | |
| | GGTGTACACCCTGCCCCCAAGCCGGGAGGAGATGACCAAGAACCA | |
| | GGTCAGCCTGACGTGCCTGGTCAAAGGCTTCTATCCCAGCGACATC | |
| | GCCGTGGAGTGGGAGAGCAATGGGCAGCCGGAGAACAACTACAA | |
| | GACCACGCCTCCCGTGCTGGACTCCGACGGCTCCTTCTTCCTCTAC | |
| | AGCAAGCTCACCGTGGACAAGAGCAGGTGGCAGCAGGGGAACGT | |
| | CTTCTCATGCTCCGTGATGCATGAGGCTCTGCACAACCACTACACG | |
| | CAGAAGAGCCTCTCCCTGTCTCCGGGTAAA | |
| TraL- | GACATTCAGATGACCCAATCCCCCTCTAGCCTTTCAGCCTCCGTAG | 478 |
| Q100C- | GGGACAGAGTTACAATAACCTGTAGGGCTAGTCAGGACGTTAATA | |
| wtFc | CAGCAGTCGCATGGTACCAGCAGAAGCCCGGTAAGGCTCCTAAGC | |
| | TTTTGATCTACAGTGCTTCTTTCCTGTATTCTGGTGTACCTAGCCGA | |
| | TTCTCAGGCTCTCGGAGTGGCACAGACTTCACTCTGACAATTTCAA | |
| | GTCTCCAGCCAGAAGATTTTGCAACCTACTACTGCCAACAACACTA | |
| | CACTACTCCTCCAACCTTCGGATGTGGCACAAAAGTAGAGATTAA | |
| | GCGTACGGTGGCAGCTCCCAGCGTTTTTATCTTTCCCCCATCCGAC | |
| | GAGCAGCTCAAGAGTGGCACTGCCTCTGTAGTTTGTTTGCTGAATA | |
| | ACTTCTATCCACGTGAAGCAAAAGTACAGTGGAAGGTCGATAATG | |
| | CCCTTCAGAGCGGTAACAGCCAAGAAAGTGTTACCGAGCAAGATT | |
| | CCAAAGATTCCACTTACAGTCTGTCCAGCACATTGACACTGAGTAA | |
| | GGCTGATTACGAAAAACACAAGGTGTACGCATGCGAGGTGACACA | |
| | CCAAGGTCTTTCATCTCCTGTAACTAAGAGCTTTAACCGGGGAGAA | |
| | TGTGGTGGTGGGGGCAGCGGGGGCGGAGGTAGTGGAGGCGGCGG | |
| | TAGTGAACCAAAGAGTAGTGACAAAACTCACACGTGCCCACCGTG | |
| | CCCAGCACCTGAACTCCTGGGGGGACCGTCAGTCTTCCTCTTCCCC | |
| | CCAAAACCCAAGGACACCCTCATGATCTCCCGGACCCCTGAGGTC | |
| | ACATGCGTGGTGGTGGACGTGAGCCACGAAGACCCTGAGGTCAAG | |
| | TTCAACTGGTACGTGGACGGCGTGGAGGTGCATAATGCCAAGACA | |
| | AAGCCGCGGGAGGAGCAGTACAACAGCACGTACCGTGTGGTCAGC | |
| | GTCCTCACCGTCCTGCACCAGGACTGGCTGAATGGCAAGGAGTAC | |
| | AAGTGCAAGGTCTCCAACAAAGCCCTCCCAGCCCCCATCGAGAAA | |
| | ACCATCTCCAAAGCCAAAGGGCAGCCCCGAGAACCACAGGTGTAC | |
| | ACCCTGCCCCCAAGCCGGGAGGAGATGACCAAGAACCAGGTCAGC | |
| | CTGACGTGCCTGGTCAAAGGCTTCTATCCCAGCGACATCGCCGTGG | |
| | AGTGGGAGAGCAATGGGCAGCCGGAGAACAACTACAAGACCACG | |
| | CCTCCCGTGCTGGACTCCGACGGCTCCTTCTTCCTCTACAGCAAGC | |
| | TCACCGTGGACAAGAGCAGGTGGCAGCAGGGGAACGTCTTCTCAT | |
| | GCTCCGTGATGCATGAGGCTCTGCACAACCACTACACGCAGAAGA | |
| | GCCTCTCCCTGTCTCCGGGTAAA | |

### Example 5. Characterization of H01Fv Variant

[0326] The schematic diagram of Fv-(Fc)₂, in which two Fc domains are fused in parallel to an antibody Fv fragment, is shown in FIGS. 10a to 10g. Fv consists of a VH domain and a VL domain. In order to improve interaction of the domains at the domain interfaces, a disulfide bond was formed artificially by substituting an amino acid at a specific position with cysteine (FIGS. 10a to 10h, Table 19).

TABLE 19

| | VH Mutation site | VL Mutation site | MW |
|---|---|---|---|
| | (Kabat numbering) | (Kabat numbering) | (kDa) |
| H01Fv1 | G44C | Q100C | 128.21 |
| H01Fv2 | Q105C | A43C | 128.19 |
| H01Fv3 | F122C | S121C | 130.98 |
| H01Fv4 | G44C, Q105C | Q100C, A43C | 130.01 |
| H01Fv5 | G44C, F122C | Q100C, S121C | 130.00 |
| H01Fv6 | Q105C, F126C | A43C, S121C | 130.99 |
| H01Fv7 | G44C, Q105C, F126C | Q100C, A43C, S121C | 131.01 |

[0327] Table 20 shows the polypeptide sequences constituting H01Fv1 to H01Fv7.

TABLE 20

| | | SEQ |
|---|---|---|
| Name | Sequence | ID NO |
| Fc-Hole-RF | DKTHTCPPCPAPELLGGPSVFLFPPKPKDTLMISRTPEVTCVVVDVSHE | 789 |
| | DPEVKFNWYVDGVEVHNAKTKPREEQYNSTYRVVSVLTVLHQDWL | |
| | NGKEYKCKVSNKALPAPIEKTISKAKGQPREPQVCTLPPSREEMTKNQ | |
| | VSLSCAVKGFYPSDIAVEWESNGQPENNYKTTPPVLDSDGSFFLVSKL | |
| | TVDKSRWQQGNVFSCSVMHEALHNRFTQKSLSLSPGK | |
| H01Fv1-HC | EVQLVESGGGLVQPGGSLRLSCAASGFNIKDTYIHWVRQAPGKCLEW | 790 |
| | VARIYPTNGYTRYADSVKGRFTISADTSKNTAYLQMNSLRAEDTAVY | |
| | YCSRWGGDGFYAMDYWGQGTLVTVSSEPKSCDKTHTCPPCPAPELL | |
| | GGPSVFLFPPKPKDTLMISRTPEVTCVVVDVSHEDPEVKFNWYVDGV | |
| | EVHNAKTKPREEQYNSTYRVVSVLTVLHQDWLNGKEYKCKVSNKAL | |
| | PAPIEKTISKAKGQPREPQVYTLPPCREEMTKNQVSLWCLVKGFYPSD | |
| | IAVEWESNGQPENNYKTTPPVLDSDGSFFLYSKLTVDKSRWQQGNVF | |
| | SCSVMHEALHNHYTQKSLSLSPGK | |
| H01Fv1-LC | DIQMTQSPSSLSASVGDRVTITCRASQDVNTAVAWYQQKPGKAPKLL | 791 |
| | IYSASFLYSGVPSRFSGSRSGTDFTLTISSLQPEDFATYYCQQHYTTPPT | |
| | FGCGTKVEIKREPKSCDKTHTCPPCPAPELLGGPSVFLFPPKPKDTLMI | |
| | SRTPEVTCVVVDVSHEDPEVKFNWYVDGVEVHNAKTKPREEQYNST | |
| | YRVVSVLTVLHQDWLNGKEYKCKVSNKALPAPIEKTISKAKGQPREP | |
| | QVYTLPPCREEMTKNQVSLWCLVKGFYPSDIAVEWESNGQPENNYK | |
| | TTPPVLDSDGSFFLYSKLTVDKSRWQQGNVFSCSVMHEALHNHYTQK | |
| | SLSLSPGK | |
| H01Fv2-HC | EVQLVESGGGLVQPGGSLRLSCAASGFNIKDTYIHWVRQAPGKGLEW | 792 |
| | VARIYPTNGYTRYADSVKGRFTISADTSKNTAYLQMNSLRAEDTAVY | |
| | YCSRWGGDGFYAMDYWGCGTLVTVSSEPKSCDKTHTCPPCPAPELL | |
| | GGPSVFLFPPKPKDTLMISRTPEVTCVVVDVSHEDPEVKFNWYVDGV | |
| | EVHNAKTKPREEQYNSTYRVVSVLTVLHQDWLNGKEYKCKVSNKAL | |
| | PAPIEKTISKAKGQPREPQVYTLPPCREEMTKNQVSLWCLVKGFYPSD | |
| | IAVEWESNGQPENNYKTTPPVLDSDGSFFLYSKLTVDKSRWQQGNVF | |
| | SCSVMHEALHNHYTQKSLSLSPGK | |
| H01Fv2-LC | DIQMTQSPSSLSASVGDRVTITCRASQDVNTAVAWYQQKPGKCPKLLI | 793 |
| | YSASFLYSGVPSRFSGSRSGTDFTLTISSLQPEDFATYYCQQHYTTPPTF | |
| | GQGTKVEIKREPKSCDKTHTCPPCPAPELLGGPSVFLFPPKPKDTLMIS | |
| | RTPEVTCVVVDVSHEDPEVKFNWYVDGVEVHNAKTKPREEQYNSTY | |
| | RVVSVLTVLHQDWLNGKEYKCKVSNKALPAPIEKTISKAKGQPREPQ | |
| | VYTLPPCREEMTKNQVSLWCLVKGFYPSDIAVEWESNGQPENNYKTT | |
| | PPVLDSDGSFFLYSKLTVDKSRWQQGNVFSCSVMHEALHNHYTQKSL | |
| | SLSPGK | |
| H01Fv3-HC | EVQLVESGGGLVQPGGSLRLSCAASGFNIKDTYIHWVRQAPGKGLEW | 794 |
| | VARIYPTNGYTRYADSVKGRFTISADTSKNTAYLQMNSLRAEDTAVY | |
| | YCSRWGGDGFYAMDYWGQGTLVTVSSASTKGPSVCPLAPEPKSCDK | |
| | THTCPPCPAPELLGGPSVFLFPPKPKDTLMISRTPEVTCVVVDVSHEDP | |
| | EVKFNWYVDGVEVHNAKTKPREEQYNSTYRVVSVLTVLHQDWLNG | |
| | KEYKCKVSNKALPAPIEKTISKAKGQPREPQVYTLPPCREEMTKNQVS | |
| | LWCLVKGFYPSDIAVEWESNGQPENNYKTTPPVLDSDGSFFLYSKLT | |
| | VDKSRWQQGNVFSCSVMHEALHNHYTQKSLSLSPGK | |
| H01Fv3-LC | DIQMTQSPSSLSASVGDRVTITCRASQDVNTAVAWYQQKPGKAPKLL | 795 |
| | IYSASFLYSGVPSRFSGSRSGTDFTLTISSLQPEDFATYYCQQHYTTPPT | |
| | FGQGTKVEIKRTVAAPSVFIFPPCGGGSEPKSCDKTHTCPPCPAPELLG | |
| | GPSVFLFPPKPKDTLMISRTPEVTCVVVDVSHEDPEVKFNWYVDGVE | |
| | VHNAKTKPREEQYNSTYRVVSVLTVLHQDWLNGKEYKCKVSNKALP | |
| | APIEKTISKAKGQPREPQVYTLPPCREEMTKNQVSLWCLVKGFYPSDI | |
| | AVEWESNGQPENNYKTTPPVLDSDGSFFLYSKLTVDKSRWQQGNVFS | |
| | CSVMHEALHNHYTQKSLSLSPGK | |
| H01Fv4-HC | EVQLVESGGGLVQPGGSLRLSCAASGFNIKDTYIHWVRQAPGKCLEW | 796 |
| | VARIYPTNGYTRYADSVKGRFTISADTSKNTAYLQMNSLRAEDTAVY | |
| | YCSRWGGDGFYAMDYWGCGTLVTVSSASTKGPSVCPLAPEPKSCDK | |
| | THTCPPCPAPELLGGPSVFLFPPKPKDTLMISRTPEVTCVVVDVSHEDP | |
| | EVKFNWYVDGVEVHNAKTKPREEQYNSTYRVVSVLTVLHQDWLNG | |
| | KEYKCKVSNKALPAPIEKTISKAKGQPREPQVYTLPPCREEMTKNQVS | |
| | LWCLVKGFYPSDIAVEWESNGQPENNYKTTPPVLDSDGSFFLYSKLT | |
| | VDKSRWQQGNVFSCSVMHEALHNHYTQKSLSLSPGK | |
| H01Fv4-LC | DIQMTQSPSSLSASVGDRVTITCRASQDVNTAVAWYQQKPGKCPKLLI | 797 |
| | YSASFLYSGVPSRFSGSRSGTDFTLTISSLQPEDFATYYCQQHYTTPPTF | |
| | GCGTKVEIKREPKSCDKTHTCPPCPAPELLGGPSVFLFPPKPKDTLMIS | |
| | RTPEVTCVVVDVSHEDPEVKFNWYVDGVEVHNAKTKPREEQYNSTY | |
| | RVVSVLTVLHQDWLNGKEYKCKVSNKALPAPIEKTISKAKGQPREPQ | |
| | VYTLPPCREEMTKNQVSLWCLVKGFYPSDIAVEWESNGQPENNYKTT | |
| | PPVLDSDGSFFLYSKLTVDKSRWQQGNVFSCSVMHEALHNHYTQKSL | |
| | SLSPGK | |
| H01Fv5-HC | EVQLVESGGGLVQPGGSLRLSCAASGFNIKDTYIHWVRQAPGKCLEW | 798 |
| | VARIYPTNGYTRYADSVKGRFTISADTSKNTAYLQMNSLRAEDTAVY | |
| | YCSRWGGDGFYAMDYWGQGTLVTVSSASTKGPSVCPLAPEPKSCDK | |
| | THTCPPCPAPELLGGPSVFLFPPKPKDTLMISRTPEVTCVVVDVSHEDP | |
| | EVKFNWYVDGVEVHNAKTKPREEQYNSTYRVVSVLTVLHQDWLNG | |
| | KEYKCKVSNKALPAPIEKTISKAKGQPREPQVYTLPPCREEMTKNQVS | |
| | LWCLVKGFYPSDIAVEWESNGQPENNYKTTPPVLDSDGSFFLYSKLT | |
| | VDKSRWQQGNVFSCSVMHEALHNHYTQKSLSLSPGK | |
| H01Fv5-LC | DIQMTQSPSSLSASVGDRVTITCRASQDVNTAVAWYQQKPGKAPKLL | 799 |
| | IYSASFLYSGVPSRFSGSRSGTDFTLTISSLQPEDFATYYCQQHYTTPPT | |
| | FGCGTKVEIKRTVAAPSVFIFPPCGGGSEPKSCDKTHTCPPCPAPELLG | |
| | GPSVFLFPPKPKDTLMISRTPEVTCVVVDVSHEDPEVKFNWYVDGVE | |
| | VHNAKTKPREEQYNSTYRVVSVLTVLHQDWLNGKEYKCKVSNKALP | |
| | APIEKTISKAKGQPREPQVYTLPPCREEMTKNQVSLWCLVKGFYPSDI | |
| | AVEWESNGQPENNYKTTPPVLDSDGSFFLYSKLTVDKSRWQQGNVFS | |
| | CSVMHEALHNHYTQKSLSLSPGK | |
| H01Fv6-HC | EVQLVESGGGLVQPGGSLRLSCAASGFNIKDTYIHWVRQAPGKGLEW | 800 |
| | VARIYPTNGYTRYADSVKGRFTISADTSKNTAYLQMNSLRAEDTAVY | |
| | YCSRWGGDGFYAMDYWGCGTLVTVSSASTKGPSVCPLAPEPKSCDK | |
| | THTCPPCPAPELLGGPSVFLFPPKPKDTLMISRTPEVTCVVVDVSHEDP | |
| | EVKFNWYVDGVEVHNAKTKPREEQYNSTYRVVSVLTVLHQDWLNG | |
| | KEYKCKVSNKALPAPIEKTISKAKGQPREPQVYTLPPCREEMTKNQVS | |
| | LWCLVKGFYPSDIAVEWESNGQPENNYKTTPPVLDSDGSFFLYSKLT | |
| | VDKSRWQQGNVFSCSVMHEALHNHYTQKSLSLSPGK | |
| H01Fv6-LC | DIQMTQSPSSLSASVGDRVTITCRASQDVNTAVAWYQQKPGKCPKLLI | 801 |
| | YSASFLYSGVPSRFSGSRSGTDFTLTISSLQPEDFATYYCQQHYTTPPTF | |
| | GQGTKVEIKRTVAAPSVFIFPPCGGGSEPKSCDKTHTCPPCPAPELLGG | |
| | PSVFLFPPKPKDTLMISRTPEVTCVVVDVSHEDPEVKFNWYVDGVEV | |
| | HNAKTKPREEQYNSTYRVVSVLTVLHQDWLNGKEYKCKVSNKALPA | |
| | PIEKTISKAKGQPREPQVYTLPPCREEMTKNQVSLWCLVKGFYPSDIA | |
| | VEWESNGQPENNYKTTPPVLDSDGSFFLYSKLTVDKSRWQQGNVFSC | |
| | SVMHEALHNHYTQKSLSLSPGK | |
| H01Fv7-HC | EVQLVESGGGLVQPGGSLRLSCAASGFNIKDTYIHWVRQAPGKCLEW | 802 |
| | VARIYPTNGYTRYADSVKGRFTISADTSKNTAYLQMNSLRAEDTAVY | |
| | YCSRWGGDGFYAMDYWGCGTLVTVSSASTKGPSVCPLAPEPKSCDK | |
| | THTCPPCPAPELLGGPSVFLFPPKPKDTLMISRTPEVTCVVVDVSHEDP | |
| | EVKFNWYVDGVEVHNAKTKPREEQYNSTYRVVSVLTVLHQDWLNG | |
| | KEYKCKVSNKALPAPIEKTISKAKGQPREPQVYTLPPCREEMTKNQVS | |
| | LWCLVKGFYPSDIAVEWESNGQPENNYKTTPPVLDSDGSFFLYSKLT | |
| | VDKSRWQQGNVFSCSVMHEALHNHYTQKSLSLSPGK | |
| H01Fv7-LC | DIQMTQSPSSLSASVGDRVTITCRASQDVNTAVAWYQQKPGKCPKLLI | 803 |
| | YSASFLYSGVPSRFSGSRSGTDFTLTISSLQPEDFATYYCQQHYTTPPTF | |
| | GCGTKVEIKRTVAAPSVFIFPPCGGGSEPKSCDKTHTCPPCPAPELLGG | |
| | PSVFLFPPKPKDTLMISRTPEVTCVVVDVSHEDPEVKFNWYVDGVEV | |
| | HNAKTKPREEQYNSTYRVVSVLTVLHQDWLNGKEYKCKVSNKALPA | |
| | PIEKTISKAKGQPREPQVYTLPPCREEMTKNQVSLWCLVKGFYPSDIA | |
| | VEWESNGQPENNYKTTPPVLDSDGSFFLYSKLTVDKSRWQQGNVFSC | |
| | SVMHEALHNHYTQKSLSLSPGK | |

[0328] Table 21 shows the nucleotide sequences encoding polypeptides constituting H01Fv1 to H01Fv7.

TABLE 21

| | | SEQ |
|---|---|---|
| Name | Sequence | ID NO |
| Fc-Hole- | GACAAAACTCACACATGCCCACCGTGCCCAGCACCTGAACTCCTG | 804 |
| RF | GGGGGACCGTCAGTCTTCCTCTTCCCCCCAAAACCCAAGGACACCC | |
| | TCATGATCTCCCGGACCCCTGAGGTCACATGCGTGGTGGTGGACGT | |
| | GAGCCACGAAGACCCTGAGGTCAAGTTCAACTGGTACGTGGACGG | |
| | CGTGGAGGTGCATAATGCCAAGACAAAGCCGCGGGAGGAGCAGT | |
| | ACAACAGCACGTACCGTGTGGTCAGCGTCCTCACCGTCCTGCACCA | |
| | GGACTGGCTGAATGGCAAGGAGTACAAGTGCAAGGTCTCCAACAA | |
| | AGCCCTCCCAGCCCCCATCGAGAAAACCATCTCCAAAGCCAAAGG | |
| | GCAGCCCCGAGAACCACAGGTGTGCACCCTGCCCCCATCCCGGGA | |
| | GGAGATGACCAAGAACCAGGTCAGCCTGAGCTGCGCGGTCAAAGG | |
| | CTTCTATCCCAGCGACATCGCCGTGGAGTGGGAGAGCAATGGGCA | |
| | GCCGGAGAACAACTACAAGACCACGCCTCCCGTGCTGGACTCCGA | |
| | CGGCTCCTTCTTCCTCGTGAGCAAGCTCACCGTGGACAAGAGCAGG | |
| | TGGCAGCAGGGGAACGTCTTCTCATGCTCCGTGATGCATGAGGCTC | |
| | TGCACAACAGATTTACGCAGAAGAGCCTCTCCCTGTCTCCGGGTAA | |
| | A | |
| H01Fv1-HC | GAAGTTCAACTTGTGGAGTCTGGAGGCGGTTTGGTACAACCTGGA | 805 |
| | GGTTCACTTCGTTTGTCATGTGCTGCCTCTGGGTTTAATATCAAGG | |
| | ATACTTATATTCATTGGGTTCGCCAGGCACCCGGAAAATGCCTGGA | |
| | ATGGGTGGCCCGTATATATCCCACTAACGGTTACACTCGATATGCT | |
| | GACTCTGTAAAGGGTCGATTTACTATATCCGCTGATACTAGCAAAA | |
| | ACACTGCCTACCTCCAGATGAACAGTCTGCGCGCCGAGGATACAG | |
| | CAGTTTATTATTGTTCCCGATGGGGAGGTGACGGGTTCTATGCCAT | |
| | GGACTACTGGGGTCAAGGGACACTGGTAACCGTTTCTTCTGAACCA | |
| | AAGTCTTGTGACAAAACTCACACGTGCCCACCGTGCCCAGCACCTG | |
| | AACTCCTGGGGGGACCGTCAGTCTTCCTCTTCCCCCCAAAACCCAA | |
| | GGACACCCTCATGATCTCCCGGACCCCTGAGGTCACATGCGTGGTG | |
| | GTGGACGTGAGCCACGAAGACCCTGAGGTCAAGTTCAACTGGTAC | |
| | GTGGACGGCGTGGAGGTGCATAATGCCAAGACAAAGCCGCGGGA | |
| | GGAGCAGTACAACAGCACGTACCGTGTGGTCAGCGTCCTCACCGT | |
| | CCTGCACCAGGACTGGCTGAATGGCAAGGAGTACAAGTGCAAGGT | |
| | CTCCAACAAAGCCCTCCCAGCCCCCATCGAGAAAACCATCTCCAA | |
| | AGCCAAAGGGCAGCCCCGAGAACCACAGGTGTACACCCTGCCCCC | |
| | ATGCCGGGAGGAGATGACCAAGAACCAGGTCAGCCTGTGGTGCCT | |
| | GGTCAAAGGCTTCTATCCCAGCGACATCGCCGTGGAGTGGGAGAG | |
| | CAATGGGCAGCCGGAGAACAACTACAAGACCACGCCTCCCGTGCT | |
| | GGACTCCGACGGCTCCTTCTTCCTCTACAGCAAGCTCACCGTGGAC | |
| | AAGAGCAGGTGGCAGCAGGGGAACGTCTTCTCATGCTCCGTGATG | |
| | CATGAGGCTCTGCACAACCACTACACGCAGAAGAGCCTCTCCCTGT | |
| | CTCCGGGTAAA | |
| H01Fv1-LC | GACATTCAGATGACCCAATCCCCCTCTAGCCTTTCAGCCTCCGTAG | 806 |
| | GGGACAGAGTTACAATAACCTGTAGGGCTAGTCAGGACGTTAATA | |
| | CAGCAGTCGCATGGTACCAGCAGAAGCCCGGTAAGGCTCCTAAGC | |
| | TTTTGATCTACAGTGCTTCTTTCCTGTATTCTGGTGTACCTAGCCGA | |
| | TTCTCAGGCTCTCGGAGTGGCACAGACTTCACTCTGACAATTTCAA | |
| | GTCTCCAGCCAGAAGATTTTGCAACCTACTACTGCCAACAACACTA | |
| | CACTACTCCTCCAACCTTCGGATGTGGCACAAAAGTAGAGATTAA | |
| | GCGTGAACCAAAGTCTTGTGACAAAACTCACACGTGCCCACCGTG | |
| | CCCAGCACCTGAACTCCTGGGGGGACCGTCAGTCTTCCTCTTCCCC | |
| | CCAAAACCCAAGGACACCCTCATGATCTCCCGGACCCCTGAGGTC | |
| | ACATGCGTGGTGGTGGACGTGAGCCACGAAGACCCTGAGGTCAAG | |
| | TTCAACTGGTACGTGGACGGCGTGGAGGTGCATAATGCCAAGACA | |
| | AAGCCGCGGGAGGAGCAGTACAACAGCACGTACCGTGTGGTCAGC | |
| | GTCCTCACCGTCCTGCACCAGGACTGGCTGAATGGCAAGGAGTAC | |
| | AAGTGCAAGGTCTCCAACAAAGCCCTCCCAGCCCCCATCGAGAAA | |
| | ACCATCTCCAAAGCCAAAGGGCAGCCCCGAGAACCACAGGTGTAC | |
| | ACCCTGCCCCCATGCCGGGAGGAGATGACCAAGAACCAGGTCAGC | |
| | CTGTGGTGCCTGGTCAAAGGCTTCTATCCCAGCGACATCGCCGTGG | |
| | AGTGGGAGAGCAATGGGCAGCCGGAGAACAACTACAAGACCACG | |
| | CCTCCCGTGCTGGACTCCGACGGCTCCTTCTTCCTCTACAGCAAGC | |
| | TCACCGTGGACAAGAGCAGGTGGCAGCAGGGGAACGTCTTCTCAT | |
| | GCTCCGTGATGCATGAGGCTCTGCACAACCACTACACGCAGAAGA | |
| | GCCTCTCCCTGTCTCCGGGTAAA | |
| H01Fv2-HC | GAAGTTCAACTTGTGGAGTCTGGAGGCGGTTTGGTACAACCTGGA | 807 |
| | GGTTCACTTCGTTTGTCATGTGCTGCCTCTGGGTTTAATATCAAGG | |
| | ATACTTATATTCATTGGGTTCGCCAGGCACCCGGAAAAGGGCTGG | |
| | AATGGGTGGCCCGTATATATCCCACTAACGGTTACACTCGATATGC | |
| | TGACTCTGTAAAGGGTCGATTTACTATATCCGCTGATACTAGCAAA | |
| | AACACTGCCTACCTCCAGATGAACAGTCTGCGCGCCGAGGATACA | |
| | GCAGTTTATTATTGTTCCCGATGGGGAGGTGACGGGTTCTATGCCA | |
| | TGGACTACTGGGGTTGTGGGACACTGGTAACCGTTTCTTCTGAACC | |
| | AAAGTCTTGTGACAAAACTCACACGTGCCCACCGTGCCCAGCACCT | |
| | GAACTCCTGGGGGGACCGTCAGTCTTCCTCTTCCCCCCAAAACCCA | |
| | AGGACACCCTCATGATCTCCCGGACCCCTGAGGTCACATGCGTGGT | |
| | GGTGGACGTGAGCCACGAAGACCCTGAGGTCAAGTTCAACTGGTA | |
| | CGTGGACGGCGTGGAGGTGCATAATGCCAAGACAAAGCCGCGGGA | |
| | GGAGCAGTACAACAGCACGTACCGTGTGGTCAGCGTCCTCACCGT | |
| | CCTGCACCAGGACTGGCTGAATGGCAAGGAGTACAAGTGCAAGGT | |
| | CTCCAACAAAGCCCTCCCAGCCCCCATCGAGAAAACCATCTCCAA | |
| | AGCCAAAGGGCAGCCCCGAGAACCACAGGTGTACACCCTGCCCCC | |
| | ATGCCGGGAGGAGATGACCAAGAACCAGGTCAGCCTGTGGTGCCT | |
| | GGTCAAAGGCTTCTATCCCAGCGACATCGCCGTGGAGTGGGAGAG | |
| | CAATGGGCAGCCGGAGAACAACTACAAGACCACGCCTCCCGTGCT | |
| | GGACTCCGACGGCTCCTTCTTCCTCTACAGCAAGCTCACCGTGGAC | |
| | AAGAGCAGGTGGCAGCAGGGGAACGTCTTCTCATGCTCCGTGATG | |
| | CATGAGGCTCTGCACAACCACTACACGCAGAAGAGCCTCTCCCTGT | |
| | CTCCGGGTAAA | |
| H01Fv2-LC | GACATTCAGATGACCCAATCCCCCTCTAGCCTTTCAGCCTCCGTAG | 808 |
| | GGGACAGAGTTACAATAACCTGTAGGGCTAGTCAGGACGTTAATA | |
| | CAGCAGTCGCATGGTACCAGCAGAAGCCCGGTAAGTGTCCTAAGC | |
| | TTTTGATCTACAGTGCTTCTTTCCTGTATTCTGGTGTACCTAGCCGA | |
| | TTCTCAGGCTCTCGGAGTGGCACAGACTTCACTCTGACAATTTCAA | |
| | GTCTCCAGCCAGAAGATTTTGCAACCTACTACTGCCAACAACACTA | |
| | CACTACTCCTCCAACCTTCGGACAGGGCACAAAAGTAGAGATTAA | |
| | GCGTGAACCAAAGTCTTGTGACAAAACTCACACGTGCCCACCGTG | |
| | CCCAGCACCTGAACTCCTGGGGGGACCGTCAGTCTTCCTCTTCCCC | |
| | CCAAAACCCAAGGACACCCTCATGATCTCCCGGACCCCTGAGGTC | |
| | ACATGCGTGGTGGTGGACGTGAGCCACGAAGACCCTGAGGTCAAG | |
| | TTCAACTGGTACGTGGACGGCGTGGAGGTGCATAATGCCAAGACA | |
| | AAGCCGCGGGAGGAGCAGTACAACAGCACGTACCGTGTGGTCAGC | |
| | GTCCTCACCGTCCTGCACCAGGACTGGCTGAATGGCAAGGAGTAC | |
| | AAGTGCAAGGTCTCCAACAAAGCCCTCCCAGCCCCCATCGAGAAA | |
| | ACCATCTCCAAAGCCAAAGGGCAGCCCCGAGAACCACAGGTGTAC | |
| | ACCCTGCCCCCATGCCGGGAGGAGATGACCAAGAACCAGGTCAGC | |
| | CTGTGGTGCCTGGTCAAAGGCTTCTATCCCAGCGACATCGCCGTGG | |
| | AGTGGGAGAGCAATGGGCAGCCGGAGAACAACTACAAGACCACG | |
| | CCTCCCGTGCTGGACTCCGACGGCTCCTTCTTCCTCTACAGCAAGC | |
| | TCACCGTGGACAAGAGCAGGTGGCAGCAGGGGAACGTCTTCTCAT | |
| | GCTCCGTGATGCATGAGGCTCTGCACAACCACTACACGCAGAAGA | |
| | GCCTCTCCCTGTCTCCGGGTAAA | |
| H01Fv3-HC | GAAGTTCAACTTGTGGAGTCTGGAGGCGGTTTGGTACAACCTGGA | 809 |
| | GGTTCACTTCGTTTGTCATGTGCTGCCTCTGGGTTTAATATCAAGG | |
| | ATACTTATATTCATTGGGTTCGCCAGGCACCCGGAAAAGGGCTGG | |
| | AATGGGTGGCCCGTATATATCCCACTAACGGTTACACTCGATATGC | |
| | TGACTCTGTAAAGGGTCGATTTACTATATCCGCTGATACTAGCAAA | |
| | AACACTGCCTACCTCCAGATGAACAGTCTGCGCGCCGAGGATACA | |
| | GCAGTTTATTATTGTTCCCGATGGGGAGGTGACGGGTTCTATGCCA | |
| | TGGACTACTGGGGTCAAGGGACACTGGTAACCGTTTCTTCTGCTAG | |
| | CACCAAAGGACCTAGTGTTTGTCCTCTTGCCCCTGAACCAAAGTCT | |
| | TGTGACAAAACTCACACGTGCCCACCGTGCCCAGCACCTGAACTCC | |
| | TGGGGGGACCGTCAGTCTTCCTCTTCCCCCCAAAACCCAAGGACAC | |
| | CCTCATGATCTCCCGGACCCCTGAGGTCACATGCGTGGTGGTGGAC | |
| | GTGAGCCACGAAGACCCTGAGGTCAAGTTCAACTGGTACGTGGAC | |
| | GGCGTGGAGGTGCATAATGCCAAGACAAAGCCGCGGGAGGAGCA | |
| | GTACAACAGCACGTACCGTGTGGTCAGCGTCCTCACCGTCCTGCAC | |
| | CAGGACTGGCTGAATGGCAAGGAGTACAAGTGCAAGGTCTCCAAC | |
| | AAAGCCCTCCCAGCCCCCATCGAGAAAACCATCTCCAAAGCCAAA | |
| | GGGCAGCCCCGAGAACCACAGGTGTACACCCTGCCCCCATGCCGG | |
| | GAGGAGATGACCAAGAACCAGGTCAGCCTGTGGTGCCTGGTCAAA | |
| | GGCTTCTATCCCAGCGACATCGCCGTGGAGTGGGAGAGCAATGGG | |
| | CAGCCGGAGAACAACTACAAGACCACGCCTCCCGTGCTGGACTCC | |
| | GACGGCTCCTTCTTCCTCTACAGCAAGCTCACCGTGGACAAGAGCA | |
| | GGTGGCAGCAGGGGAACGTCTTCTCATGCTCCGTGATGCATGAGG | |
| | CTCTGCACAACCACTACACGCAGAAGAGCCTCTCCCTGTCTCCGGG | |
| | TAAA | |
| H01Fv3-LC | GACATTCAGATGACCCAATCCCCCTCTAGCCTTTCAGCCTCCGTAG | 810 |
| | GGGACAGAGTTACAATAACCTGTAGGGCTAGTCAGGACGTTAATA | |
| | CAGCAGTCGCATGGTACCAGCAGAAGCCCGGTAAGGCTCCTAAGC | |
| | TTTTGATCTACAGTGCTTCTTTCCTGTATTCTGGTGTACCTAGCCGA | |
| | TTCTCAGGCTCTCGGAGTGGCACAGACTTCACTCTGACAATTTCAA | |
| | GTCTCCAGCCAGAAGATTTTGCAACCTACTACTGCCAACAACACTA | |
| | CACTACTCCTCCAACCTTCGGACAGGGCACAAAAGTAGAGATTAA | |
| | GCGTACGGTGGCAGCTCCCAGCGTTTTTATCTTTCCCCCATGTGGA | |
| | GGTGGAAGTGAACCAAAGTCTTGTGACAAAACTCACACGTGCCCA | |
| | CCGTGCCCAGCACCTGAACTCCTGGGGGGACCGTCAGTCTTCCTCT | |
| | TCCCCCCAAAACCCAAGGACACCCTCATGATCTCCCGGACCCCTGA | |
| | GGTCACATGCGTGGTGGTGGACGTGAGCCACGAAGACCCTGAGGT | |
| | CAAGTTCAACTGGTACGTGGACGGCGTGGAGGTGCATAATGCCAA | |
| | GACAAAGCCGCGGGAGGAGCAGTACAACAGCACGTACCGTGTGGT | |
| | CAGCGTCCTCACCGTCCTGCACCAGGACTGGCTGAATGGCAAGGA | |
| | GTACAAGTGCAAGGTCTCCAACAAAGCCCTCCCAGCCCCCATCGA | |
| | GAAAACCATCTCCAAAGCCAAAGGGCAGCCCCGAGAACCACAGGT | |
| | GTACACCCTGCCCCCATGCCGGGAGGAGATGACCAAGAACCAGGT | |
| | CAGCCTGTGGTGCCTGGTCAAAGGCTTCTATCCCAGCGACATCGCC | |
| | GTGGAGTGGGAGAGCAATGGGCAGCCGGAGAACAACTACAAGAC | |
| | CACGCCTCCCGTGCTGGACTCCGACGGCTCCTTCTTCCTCTACAGC | |
| | AAGCTCACCGTGGACAAGAGCAGGTGGCAGCAGGGGAACGTCTTC | |
| | TCATGCTCCGTGATGCATGAGGCTCTGCACAACCACTACACGCAGA | |
| | AGAGCCTCTCCCTGTCTCCGGGTAAA | |
| H01Fv4-HC | GAAGTTCAACTTGTGGAGTCTGGAGGCGGTTTGGTACAACCTGGA | 811 |
| | GGTTCACTTCGTTTGTCATGTGCTGCCTCTGGGTTTAATATCAAGG | |
| | ATACTTATATTCATTGGGTTCGCCAGGCACCCGGAAAATGCCTGGA | |
| | ATGGGTGGCCCGTATATATCCCACTAACGGTTACACTCGATATGCT | |
| | GACTCTGTAAAGGGTCGATTTACTATATCCGCTGATACTAGCAAAA | |
| | ACACTGCCTACCTCCAGATGAACAGTCTGCGCGCCGAGGATACAG | |
| | CAGTTTATTATTGTTCCCGATGGGGAGGTGACGGGTTCTATGCCAT | |
| | GGACTACTGGGGTTGTGGGACACTGGTAACCGTTTCTTCTGCTAGC | |
| | ACCAAAGGACCTAGTGTTTGTCCTCTTGCCCCTGAACCAAAGTCTT | |
| | GTGACAAAACTCACACGTGCCCACCGTGCCCAGCACCTGAACTCCT | |
| | GGGGGGACCGTCAGTCTTCCTCTTCCCCCCAAAACCCAAGGACACC | |
| | CTCATGATCTCCCGGACCCCTGAGGTCACATGCGTGGTGGTGGACG | |
| | TGAGCCACGAAGACCCTGAGGTCAAGTTCAACTGGTACGTGGACG | |
| | GCGTGGAGGTGCATAATGCCAAGACAAAGCCGCGGGAGGAGCAG | |
| | TACAACAGCACGTACCGTGTGGTCAGCGTCCTCACCGTCCTGCACC | |
| | AGGACTGGCTGAATGGCAAGGAGTACAAGTGCAAGGTCTCCAACA | |
| | AAGCCCTCCCAGCCCCCATCGAGAAAACCATCTCCAAAGCCAAAG | |
| | GGCAGCCCCGAGAACCACAGGTGTACACCCTGCCCCCATGCCGGG | |
| | AGGAGATGACCAAGAACCAGGTCAGCCTGTGGTGCCTGGTCAAAG | |
| | GCTTCTATCCCAGCGACATCGCCGTGGAGTGGGAGAGCAATGGGC | |
| | AGCCGGAGAACAACTACAAGACCACGCCTCCCGTGCTGGACTCCG | |
| | ACGGCTCCTTCTTCCTCTACAGCAAGCTCACCGTGGACAAGAGCAG | |
| | GTGGCAGCAGGGGAACGTCTTCTCATGCTCCGTGATGCATGAGGCT | |
| | CTGCACAACCACTACACGCAGAAGAGCCTCTCCCTGTCTCCGGGTA | |
| | AA | |
| H01Fv4-LC | GACATTCAGATGACCCAATCCCCCTCTAGCCTTTCAGCCTCCGTAG | 812 |
| | GGGACAGAGTTACAATAACCTGTAGGGCTAGTCAGGACGTTAATA | |
| | CAGCAGTCGCATGGTACCAGCAGAAGCCCGGTAAGTGTCCTAAGC | |
| | TTTTGATCTACAGTGCTTCTTTCCTGTATTCTGGTGTACCTAGCCGA | |
| | TTCTCAGGCTCTCGGAGTGGCACAGACTTCACTCTGACAATTTCAA | |
| | GTCTCCAGCCAGAAGATTTTGCAACCTACTACTGCCAACAACACTA | |
| | CACTACTCCTCCAACCTTCGGATGTGGCACAAAAGTAGAGATTAA | |
| | GCGTGAACCAAAGTCTTGTGACAAAACTCACACGTGCCCACCGTG | |
| | CCCAGCACCTGAACTCCTGGGGGGACCGTCAGTCTTCCTCTTCCCC | |
| | CCAAAACCCAAGGACACCCTCATGATCTCCCGGACCCCTGAGGTC | |
| | ACATGCGTGGTGGTGGACGTGAGCCACGAAGACCCTGAGGTCAAG | |
| | TTCAACTGGTACGTGGACGGCGTGGAGGTGCATAATGCCAAGACA | |
| | AAGCCGCGGGAGGAGCAGTACAACAGCACGTACCGTGTGGTCAGC | |
| | GTCCTCACCGTCCTGCACCAGGACTGGCTGAATGGCAAGGAGTAC | |
| | AAGTGCAAGGTCTCCAACAAAGCCCTCCCAGCCCCCATCGAGAAA | |
| | ACCATCTCCAAAGCCAAAGGGCAGCCCCGAGAACCACAGGTGTAC | |
| | ACCCTGCCCCCATGCCGGGAGGAGATGACCAAGAACCAGGTCAGC | |
| | CTGTGGTGCCTGGTCAAAGGCTTCTATCCCAGCGACATCGCCGTGG | |
| | AGTGGGAGAGCAATGGGCAGCCGGAGAACAACTACAAGACCACG | |
| | CCTCCCGTGCTGGACTCCGACGGCTCCTTCTTCCTCTACAGCAAGC | |
| | TCACCGTGGACAAGAGCAGGTGGCAGCAGGGGAACGTCTTCTCAT | |
| | GCTCCGTGATGCATGAGGCTCTGCACAACCACTACACGCAGAAGA | |
| | GCCTCTCCCTGTCTCCGGGTAAA | |
| H01Fv5-HC | GAAGTTCAACTTGTGGAGTCTGGAGGCGGTTTGGTACAACCTGGA | 813 |
| | GGTTCACTTCGTTTGTCATGTGCTGCCTCTGGGTTTAATATCAAGG | |
| | ATACTTATATTCATTGGGTTCGCCAGGCACCCGGAAAATGCCTGGA | |
| | ATGGGTGGCCCGTATATATCCCACTAACGGTTACACTCGATATGCT | |
| | GACTCTGTAAAGGGTCGATTTACTATATCCGCTGATACTAGCAAAA | |
| | ACACTGCCTACCTCCAGATGAACAGTCTGCGCGCCGAGGATACAG | |
| | CAGTTTATTATTGTTCCCGATGGGGAGGTGACGGGTTCTATGCCAT | |
| | GGACTACTGGGGTCAAGGGACACTGGTAACCGTTTCTTCTGCTAGC | |
| | ACCAAAGGACCTAGTGTTTGTCCTCTTGCCCCTGAACCAAAGTCTT | |
| | GTGACAAAACTCACACGTGCCCACCGTGCCCAGCACCTGAACTCCT | |
| | GGGGGGACCGTCAGTCTTCCTCTTCCCCCCAAAACCCAAGGACACC | |
| | CTCATGATCTCCCGGACCCCTGAGGTCACATGCGTGGTGGTGGACG | |
| | TGAGCCACGAAGACCCTGAGGTCAAGTTCAACTGGTACGTGGACG | |
| | GCGTGGAGGTGCATAATGCCAAGACAAAGCCGCGGGAGGAGCAG | |
| | TACAACAGCACGTACCGTGTGGTCAGCGTCCTCACCGTCCTGCACC | |
| | AGGACTGGCTGAATGGCAAGGAGTACAAGTGCAAGGTCTCCAACA | |
| | AAGCCCTCCCAGCCCCCATCGAGAAAACCATCTCCAAAGCCAAAG | |
| | GGCAGCCCCGAGAACCACAGGTGTACACCCTGCCCCCATGCCGGG | |
| | AGGAGATGACCAAGAACCAGGTCAGCCTGTGGTGCCTGGTCAAAG | |
| | GCTTCTATCCCAGCGACATCGCCGTGGAGTGGGAGAGCAATGGGC | |
| | AGCCGGAGAACAACTACAAGACCACGCCTCCCGTGCTGGACTCCG | |
| | ACGGCTCCTTCTTCCTCTACAGCAAGCTCACCGTGGACAAGAGCAG | |
| | GTGGCAGCAGGGGAACGTCTTCTCATGCTCCGTGATGCATGAGGCT | |
| | CTGCACAACCACTACACGCAGAAGAGCCTCTCCCTGTCTCCGGGTA | |
| | AA | |
| H01Fv5-LC | GACATTCAGATGACCCAATCCCCCTCTAGCCTTTCAGCCTCCGTAG | 814 |
| | GGGACAGAGTTACAATAACCTGTAGGGCTAGTCAGGACGTTAATA | |
| | CAGCAGTCGCATGGTACCAGCAGAAGCCCGGTAAGGCTCCTAAGC | |
| | TTTTGATCTACAGTGCTTCTTTCCTGTATTCTGGTGTACCTAGCCGA | |
| | TTCTCAGGCTCTCGGAGTGGCACAGACTTCACTCTGACAATTTCAA | |
| | GTCTCCAGCCAGAAGATTTTGCAACCTACTACTGCCAACAACACTA | |
| | CACTACTCCTCCAACCTTCGGATGTGGCACAAAAGTAGAGATTAA | |
| | GCGTACGGTGGCAGCTCCCAGCGTTTTTATCTTTCCCCCATGTGGA | |
| | GGTGGAAGTGAACCAAAGTCTTGTGACAAAACTCACACGTGCCCA | |
| | CCGTGCCCAGCACCTGAACTCCTGGGGGGACCGTCAGTCTTCCTCT | |
| | TCCCCCCAAAACCCAAGGACACCCTCATGATCTCCCGGACCCCTGA | |
| | GGTCACATGCGTGGTGGTGGACGTGAGCCACGAAGACCCTGAGGT | |
| | CAAGTTCAACTGGTACGTGGACGGCGTGGAGGTGCATAATGCCAA | |
| | GACAAAGCCGCGGGAGGAGCAGTACAACAGCACGTACCGTGTGGT | |
| | CAGCGTCCTCACCGTCCTGCACCAGGACTGGCTGAATGGCAAGGA | |
| | GTACAAGTGCAAGGTCTCCAACAAAGCCCTCCCAGCCCCCATCGA | |
| | GAAAACCATCTCCAAAGCCAAAGGGCAGCCCCGAGAACCACAGGT | |
| | GTACACCCTGCCCCCATGCCGGGAGGAGATGACCAAGAACCAGGT | |
| | CAGCCTGTGGTGCCTGGTCAAAGGCTTCTATCCCAGCGACATCGCC | |
| | GTGGAGTGGGAGAGCAATGGGCAGCCGGAGAACAACTACAAGAC | |
| | CACGCCTCCCGTGCTGGACTCCGACGGCTCCTTCTTCCTCTACAGC | |
| | AAGCTCACCGTGGACAAGAGCAGGTGGCAGCAGGGGAACGTCTTC | |
| | TCATGCTCCGTGATGCATGAGGCTCTGCACAACCACTACACGCAGA | |
| | AGAGCCTCTCCCTGTCTCCGGGTAAA | |
| H01Fv6-HC | GAAGTTCAACTTGTGGAGTCTGGAGGCGGTTTGGTACAACCTGGA | 815 |
| | GGTTCACTTCGTTTGTCATGTGCTGCCTCTGGGTTTAATATCAAGG | |
| | ATACTTATATTCATTGGGTTCGCCAGGCACCCGGAAAAGGGCTGG | |
| | AATGGGTGGCCCGTATATATCCCACTAACGGTTACACTCGATATGC | |
| | TGACTCTGTAAAGGGTCGATTTACTATATCCGCTGATACTAGCAAA | |
| | AACACTGCCTACCTCCAGATGAACAGTCTGCGCGCCGAGGATACA | |
| | GCAGTTTATTATTGTTCCCGATGGGGAGGTGACGGGTTCTATGCCA | |
| | TGGACTACTGGGGTTGTGGGACACTGGTAACCGTTTCTTCTGCTAG | |
| | CACCAAAGGACCTAGTGTTTGTCCTCTTGCCCCTGAACCAAAGTCT | |
| | TGTGACAAAACTCACACGTGCCCACCGTGCCCAGCACCTGAACTCC | |
| | TGGGGGGACCGTCAGTCTTCCTCTTCCCCCCAAAACCCAAGGACAC | |
| | CCTCATGATCTCCCGGACCCCTGAGGTCACATGCGTGGTGGTGGAC | |
| | GTGAGCCACGAAGACCCTGAGGTCAAGTTCAACTGGTACGTGGAC | |
| | GGCGTGGAGGTGCATAATGCCAAGACAAAGCCGCGGGAGGAGCA | |
| | GTACAACAGCACGTACCGTGTGGTCAGCGTCCTCACCGTCCTGCAC | |
| | CAGGACTGGCTGAATGGCAAGGAGTACAAGTGCAAGGTCTCCAAC | |
| | AAAGCCCTCCCAGCCCCCATCGAGAAAACCATCTCCAAAGCCAAA | |
| | GGGCAGCCCCGAGAACCACAGGTGTACACCCTGCCCCCATGCCGG | |
| | GAGGAGATGACCAAGAACCAGGTCAGCCTGTGGTGCCTGGTCAAA | |
| | GGCTTCTATCCCAGCGACATCGCCGTGGAGTGGGAGAGCAATGGG | |
| | CAGCCGGAGAACAACTACAAGACCACGCCTCCCGTGCTGGACTCC | |
| | GACGGCTCCTTCTTCCTCTACAGCAAGCTCACCGTGGACAAGAGCA | |
| | GGTGGCAGCAGGGGAACGTCTTCTCATGCTCCGTGATGCATGAGG | |
| | CTCTGCACAACCACTACACGCAGAAGAGCCTCTCCCTGTCTCCGGG | |
| | TAAA | |
| H01Fv6-LC | GACATTCAGATGACCCAATCCCCCTCTAGCCTTTCAGCCTCCGTAG | 816 |
| | GGGACAGAGTTACAATAACCTGTAGGGCTAGTCAGGACGTTAATA | |
| | CAGCAGTCGCATGGTACCAGCAGAAGCCCGGTAAGTGTCCTAAGC | |
| | TTTTGATCTACAGTGCTTCTTTCCTGTATTCTGGTGTACCTAGCCGA | |
| | TTCTCAGGCTCTCGGAGTGGCACAGACTTCACTCTGACAATTTCAA | |
| | GTCTCCAGCCAGAAGATTTTGCAACCTACTACTGCCAACAACACTA | |
| | CACTACTCCTCCAACCTTCGGACAGGGCACAAAAGTAGAGATTAA | |
| | GCGTACGGTGGCAGCTCCCAGCGTTTTTATCTTTCCCCCATGTGGA | |
| | GGTGGAAGTGAACCAAAGTCTTGTGACAAAACTCACACGTGCCCA | |
| | CCGTGCCCAGCACCTGAACTCCTGGGGGGACCGTCAGTCTTCCTCT | |
| | TCCCCCCAAAACCCAAGGACACCCTCATGATCTCCCGGACCCCTGA | |
| | GGTCACATGCGTGGTGGTGGACGTGAGCCACGAAGACCCTGAGGT | |
| | CAAGTTCAACTGGTACGTGGACGGCGTGGAGGTGCATAATGCCAA | |
| | GACAAAGCCGCGGGAGGAGCAGTACAACAGCACGTACCGTGTGGT | |
| | CAGCGTCCTCACCGTCCTGCACCAGGACTGGCTGAATGGCAAGGA | |
| | GTACAAGTGCAAGGTCTCCAACAAAGCCCTCCCAGCCCCCATCGA | |
| | GAAAACCATCTCCAAAGCCAAAGGGCAGCCCCGAGAACCACAGGT | |
| | GTACACCCTGCCCCCATGCCGGGAGGAGATGACCAAGAACCAGGT | |
| | CAGCCTGTGGTGCCTGGTCAAAGGCTTCTATCCCAGCGACATCGCC | |
| | GTGGAGTGGGAGAGCAATGGGCAGCCGGAGAACAACTACAAGAC | |
| | CACGCCTCCCGTGCTGGACTCCGACGGCTCCTTCTTCCTCTACAGC | |
| | AAGCTCACCGTGGACAAGAGCAGGTGGCAGCAGGGGAACGTCTTC | |
| | TCATGCTCCGTGATGCATGAGGCTCTGCACAACCACTACACGCAGA | |
| | AGAGCCTCTCCCTGTCTCCGGGTAAA | |
| H01Fv7-HC | GAAGTTCAACTTGTGGAGTCTGGAGGCGGTTTGGTACAACCTGGA | 817 |
| | GGTTCACTTCGTTTGTCATGTGCTGCCTCTGGGTTTAATATCAAGG | |
| | ATACTTATATTCATTGGGTTCGCCAGGCACCCGGAAAATGCCTGGA | |
| | ATGGGTGGCCCGTATATATCCCACTAACGGTTACACTCGATATGCT | |
| | GACTCTGTAAAGGGTCGATTTACTATATCCGCTGATACTAGCAAAA | |
| | ACACTGCCTACCTCCAGATGAACAGTCTGCGCGCCGAGGATACAG | |
| | CAGTTTATTATTGTTCCCGATGGGGAGGTGACGGGTTCTATGCCAT | |
| | GGACTACTGGGGTTGTGGGACACTGGTAACCGTTTCTTCTGCTAGC | |
| | ACCAAAGGACCTAGTGTTTGTCCTCTTGCCCCTGAACCAAAGTCTT | |
| | GTGACAAAACTCACACGTGCCCACCGTGCCCAGCACCTGAACTCCT | |
| | GGGGGGACCGTCAGTCTTCCTCTTCCCCCCAAAACCCAAGGACACC | |
| | CTCATGATCTCCCGGACCCCTGAGGTCACATGCGTGGTGGTGGACG | |
| | TGAGCCACGAAGACCCTGAGGTCAAGTTCAACTGGTACGTGGACG | |
| | GCGTGGAGGTGCATAATGCCAAGACAAAGCCGCGGGAGGAGCAG | |
| | TACAACAGCACGTACCGTGTGGTCAGCGTCCTCACCGTCCTGCACC | |
| | AGGACTGGCTGAATGGCAAGGAGTACAAGTGCAAGGTCTCCAACA | |
| | AAGCCCTCCCAGCCCCCATCGAGAAAACCATCTCCAAAGCCAAAG | |
| | GGCAGCCCCGAGAACCACAGGTGTACACCCTGCCCCCATGCCGGG | |
| | AGGAGATGACCAAGAACCAGGTCAGCCTGTGGTGCCTGGTCAAAG | |
| | GCTTCTATCCCAGCGACATCGCCGTGGAGTGGGAGAGCAATGGGC | |
| | AGCCGGAGAACAACTACAAGACCACGCCTCCCGTGCTGGACTCCG | |
| | ACGGCTCCTTCTTCCTCTACAGCAAGCTCACCGTGGACAAGAGCAG | |
| | GTGGCAGCAGGGGAACGTCTTCTCATGCTCCGTGATGCATGAGGCT | |
| | CTGCACAACCACTACACGCAGAAGAGCCTCTCCCTGTCTCCGGGTA | |
| | AA | |
| H01Fv7-LC | GACATTCAGATGACCCAATCCCCCTCTAGCCTTTCAGCCTCCGTAG | 818 |
| | GGGACAGAGTTACAATAACCTGTAGGGCTAGTCAGGACGTTAATA | |
| | CAGCAGTCGCATGGTACCAGCAGAAGCCCGGTAAGTGTCCTAAGC | |
| | TTTTGATCTACAGTGCTTCTTTCCTGTATTCTGGTGTACCTAGCCGA | |
| | TTCTCAGGCTCTCGGAGTGGCACAGACTTCACTCTGACAATTTCAA | |
| | GTCTCCAGCCAGAAGATTTTGCAACCTACTACTGCCAACAACACTA | |
| | CACTACTCCTCCAACCTTCGGATGTGGCACAAAAGTAGAGATTAA | |
| | GCGTACGGTGGCAGCTCCCAGCGTTTTTATCTTTCCCCCATGTGGA | |
| | GGTGGAAGTGAACCAAAGTCTTGTGACAAAACTCACACGTGCCCA | |
| | CCGTGCCCAGCACCTGAACTCCTGGGGGGACCGTCAGTCTTCCTCT | |
| | TCCCCCCAAAACCCAAGGACACCCTCATGATCTCCCGGACCCCTGA | |
| | GGTCACATGCGTGGTGGTGGACGTGAGCCACGAAGACCCTGAGGT | |
| | CAAGTTCAACTGGTACGTGGACGGCGTGGAGGTGCATAATGCCAA | |
| | GACAAAGCCGCGGGAGGAGCAGTACAACAGCACGTACCGTGTGGT | |
| | CAGCGTCCTCACCGTCCTGCACCAGGACTGGCTGAATGGCAAGGA | |
| | GTACAAGTGCAAGGTCTCCAACAAAGCCCTCCCAGCCCCCATCGA | |
| | GAAAACCATCTCCAAAGCCAAAGGGCAGCCCCGAGAACCACAGGT | |
| | GTACACCCTGCCCCCATGCCGGGAGGAGATGACCAAGAACCAGGT | |
| | CAGCCTGTGGTGCCTGGTCAAAGGCTTCTATCCCAGCGACATCGCC | |
| | GTGGAGTGGGAGAGCAATGGGCAGCCGGAGAACAACTACAAGAC | |
| | CACGCCTCCCGTGCTGGACTCCGACGGCTCCTTCTTCCTCTACAGC | |
| | AAGCTCACCGTGGACAAGAGCAGGTGGCAGCAGGGGAACGTCTTC | |
| | TCATGCTCCGTGATGCATGAGGCTCTGCACAACCACTACACGCAGA | |
| | AGAGCCTCTCCCTGTCTCCGGGTAAA | |

[0329] When expression vectors containing the sequences corresponding to Fc-Hole-F (SEQ ID NO: 789), H01Fv1-HC (SEQ ID NO: 790), and H01Fv1-LC (SEQ ID NO: 791) were co-transfect into EXPICHO-S™ (Gibco, A29127), H01Fv1 was formed (FIG. 10, Tables 20 and 21). Thereafter, it was purified through affinity chromatography using MABSELECT™ PrismA (Cytiva, 17549853). The Fc-Hole polypeptide (SEQ ID NO: 7) can form an Fc-Hole/Fc-Hole dimer. In order to remove this Fc-Hole/Fc-Hole dimer, H435R and Y436F mutations were introduced in the Fc-Hole polypeptide sequence (SEQ ID NO: 7) to produce the Fc-Hole-RF polypeptide (SEQ ID NO: 789) (FIG. 10, Tables 20 and 21). This prevents the Fc-Hole/Fc-Hole dimer from binding to Protein A resin and removes the mispaired Fc-Hole/Fc-Hole dimer (FIGS. 10 and 11). SDS-PAGE analysis identified the main product at about 130 kDa under non-reducing conditions (NR) (FIG. 11), and monomer purity was determined by SEC (FIG. 12). H01Fv3 exists mostly in an unpaired form of about 65 kDa, and the monomer purity of fully assembled form was determined to be 14.66% (FIGS. 11 and 12c). It was found that H01Fv1, H01Fv2, H01Fv4, H01Fv5, H01Fv6, and H01Fv7 have monomer purities of 71.24%, 61.25%, 68.55%, 73.05%, 67.73%, and 79.33%, respectively (FIG. 12). The binding characteristics of H01Fv1, H01Fv2, H01Fv4, H01Fv5, H01Fv6, and H01Fv7 were analyzed using Octet Red96e (Sartorius), a bio-layer interferometry (BLI) (FIG. 13). The human HER2 recombinant protein (R&D systems, 1129-ER) was loaded onto the Anti-Penta-HIS (HIS1K) biosensor (Sartorius, 18-5120), and then the binding constants of H01Fv1, H01Fv2, H01Fv4, H01Fv5, H01Fv6, and H01Fv7 were calculated (FIG. 13, Table 22).

TABLE 22

| Clone | KD(M) | kon(1/Ms) | kdis(1/s) |
|---|---|---|---|
| H01Fv1 | 2.44E−10 | 2.10E+05 | 5.11E−05 |
| H01Fv2 | 3.24E−10 | 1.17E+05 | 3.78E−05 |
| H01Fv3 | Not Determined | Not Determined | Not Determined |
| H01Fv4 | 3.26E−10 | 2.37E+05 | 7.71E−05 |
| H01Fv5 | 3.93E−10 | 2.73E+05 | 1.07E−04 |
| H01Fv6 | 4.87E−11 | 1.36E+05 | 6.61E−06 |
| H01Fv7 | 2.79E−10 | 2.76E+05 | 7.70E−05 |

### Example 6. Analysis of Thermal Stability

[0330] Analysis of thermal stability was performed using the PROTEIN THERMAL SHIFT™ Dye Kit (Applied biosystems, 4461146) according to the manufacturer's manual. Briefly, 5 μL of reaction buffer and 2.5 μL of dye included in the kit were mixed with 5 μg of trastuzumab, pertuzumab, H01, or P01, and the final volume was adjusted to 20 μL using PBS.

[0331] The mixture was incubated at 20° C. for 30 seconds in a C1000 thermal cycler (Bio-Rad, 1841000) equipped with a CFX96 optical reaction module (Bio-Rad, 1845096), and the fluorescence intensity of the plate was measured while increasing the temperature from 20° C. to 95° C. at 1° C./min, and the reaction was stopped after incubation at 95° C. for 30 seconds.

[0332] After the reaction, the median value of relative fluorescence unit (RFU) values was taken, and analysis of melting temperature (Tₘ) was performed. The Tₘ₁ values were found to be 68, 68, 66, and 66° C. and the Tₘ₂ values were found to be 81, 79, 83, and 83° C. for trastuzumab, pertuzumab, H01, and P01, respectively, indicating that H01 and P01 have Tₘ values similar to those of commercialized therapeutic antibodies (FIG. 14, Table 23).

TABLE 23

| Antibody | Tₘ₁ | Tₘ₂ |
|---|---|---|
| Trastuzumab | 68 | 81 |
| Pertuzumab | 68 | 79 |
| H01 | 66 | 83 |
| P01 | 66 | 83 |

### Example 7. Identification of Competitive Binding of H01 and P01

[0333] In order to identify whether H01 and P01 bind to different epitopes or compete for binding, Octet Red96e (Sartorius), a bio-layer interferometry (BLI), was used.

[0334] The human HER2 recombinant protein (R&D systems, 1129-ER) was loaded onto the Anti-Penta-HIS (HIS1K) biosensor (Sartorius, 18-5120). 100 nM human IgG1 (Bio X cell, BE0297) or 100 nM H01 or 100 nM trastuzumab was first bound to each biosensor loaded with HER2 antigen, followed by 100 nM human IgG1, 100 nM P01, or 100 nM pertuzumab to determine whether they bind competitively (FIG. 15). The binding signals (nm shift from baseline) measured at equilibrium after completion of Her2 recombinant protein loading were 0.620, 0.625, and 0.672 nm, respectively (FIG. 15, Table 24).

[0335] The first and second analytes were sequentially bound with binding time and dissociation time of 900 seconds. When the human IgG1 antibody was sequentially bound, it did not bind to HER2 (FIG. 15, Table 24). Sequential binding of H01 and P01 or sequential binding of trastuzumab and pertuzumab was observed, indicating that they bind to different epitopes (FIG. 15, Table 24). The binding signals (nm shift from baseline) of H01+P01 on the HER2-loaded sensor and the binding signals (nm shift from baseline) of trastuzumab+pertuzumab were measured to be 1.477 nm (=y-axis value at 4140 s−y-axis value at 1260 s), 0.923 nm (=y-axis value at 4140 s−y-axis value at 1260 s), respectively. The binding signals (nm shift from baseline) tend to increase as more proteins bind to the surface of the biosensor. Therefore, this indicates that to the same amount of HER2, H01 and P01 cause a greater amount of antibody binding than trastuzumab and pertuzumab (FIG. 15, Table 24).

TABLE 24

| | | HER2 | | |
|---|---|---|---|---|
| 1^{st} analyte - | | Loading | 1^{st} Analyte | 2^{nd} Analyte |
| 2^{nd} analyte | Baseline(0 s) | (1260 s) | binding(2160 s) | binding(4140 s) |
| hIgG1 - hIgG1 | 0 | 0.620 | 0.635 | 0.647 |
| H01- P01 | 0 | 0.625 | 1.407 | 2.102 |
| Trastuzumab - | 0 | 0.679 | 1.157 | 1.595 |
| Pertuzumab | | | | |

### Example 8. Quantification of Fc Loads

[0336] When H01 and P01 are treated in combination, a total of 16 Fc domains bind to four HER2 antigens present on the surface of cancer cells (FIG. 16a). When trastuzumab and pertuzumab are treated in combination, eight Fc domains bind to four HER2 antigens present on the surface of cancer cells if the binding is in monovalent mode, and fewer Fc domains can be bound if the binding is in bivalent mode (FIG. 16b). The combination of H01 and P01 should result in increased Fc loads on the surface of HER2-positive cancer cells than the combination of trastuzumab and pertuzumab and thereby should lead to a stronger effector function.

[0337] NCI-N87, BT474, SK-OV-3, SNU1, and SNU5 cancer cell lines used to quantify Fc loads of the antibodies on the surface of HER2-expressing cells were cultured in RPMI-1640+10% FBS medium. The cancer cell lines were treated with 50 nM human IgG1 (Bio X cell, BE0297), 50 nM trastuzumab (TRA), or 50 nM trastuzumab+50 nM pertuzumab (TRA+PER), 50 nM H01, 50 nM H01+50 nM P01 antibody at 4° C. for 30 minutes in a 96-well plate. Thereafter, they were treated with the Alexa 488 fluorescence-conjugated anti-human IgG Fcγ Fab antibody (Jackson ImmunoResearch, 109-547-008), and the antibody Fc bound to the cells was quantified using a flow cytometer (BD biosciences, FACSverse) (FIGS. 17a to 17e, Table 25). It was found that the fluorescence intensities of the 50 nM H01 alone group were higher than those of the 50 nM trastuzumab+50 nM pertuzumab (TRA+PER) combination group in the five cancer cell lines analyzed (FIGS. 17a to 17e, Table 25). Compared to treatment of 50 nM H01 alone, an additional increase in the Fc loads on the cancer cell surface was observed in the NCI-N87, BT474, SK-OV-3, SNU1, and SNU5 cancer cells when 50 nM P01 was treated in combination with 50 nM H01 (FIGS. 17a to 17e, Table 25).

TABLE 25

| | NCI- | | | | |
|---|---|---|---|---|---|
| GMFI | N87 | BT474 | SK-OV-3 | SNU-1 | SNU-5 |
| 50 nM Trastuzumab | 88911 | 23117 | 3590 | 1484 | 828 |
| 50 nM Trastuzumab + | 136810 | 38714 | 6454 | 2688 | 1388 |
| 50 nM Pertuzumab | | | | | |
| 50 nM H01 | 154548 | 52835 | 9757 | 4065 | 1600 |
| 50 nM H01 + 50 nM | 199196 | 75094 | 15961 | 7274 | 3022 |
| P01 | | | | | |

[0338] In order to determine the saturation concentration of antibodies binding to the cell surface, each test antibody was allowed to bind to a final concentration of 20, 50, and 100 nM, and the subsequent sampling process was carried out in the same manner as the above experimental conditions (FIGS. 18a to 18e). It was found that the saturation concentration of the antibody in the NCI-N87, BT474, SK-OV-3, SNU1, and SNU5 cancer cell lines was 50 nM (FIGS. 18a to 18e). It was found that treatment of 50 nM H01 alone results in more Fc loads on the surface of the five cell lines than treatment of 50 nM trastuzumab and 50 nM pertuzumab in combination (FIGS. 18a to 18e).

### Example 9. Analysis of Antibody Binding Affinity to HER2

[0339] The S239D and I332E mutations in the antibody Fc domain improve the affinity of the antibody for Fcγ receptors, which leads to improved effector function (Greg A. Lazar et al., PNAS, 2006). H01DE4 and P01DE4 were designed by introducing the S239D and I332E mutations in the H01 and P01 Fc domains (FIGS. 19a and 19b). H01DE4 was prepared by co-transfection of vectors capable of expressing the polypeptides corresponding to Fc-Hole-S239D-I332E (Table 26, SEQ ID NO: 42), TraH-G44C-Knob-S239D-I332E (Table 26, SEQ ID NO: 43), and TraL-Q100C-Knob-S239D-I332E (Table 26, SEQ ID NO: 44) into EXPICHO-S™ (Gibco, A29127). P01DE4 was prepared by co-transfection of vectors capable of expressing the polypeptides corresponding to Fc-Hole-S239D-I332E (Table 26, Table 27, and SEQ ID NO: 42), PerH-G44C-Knob-S239D-I332E (Table 26, Table 27, and SEQ ID NO: 45), and PerL-Q100C-Knob-S239D-I332E (Table 26, Table 27, and SEQ ID NO: 46) into EXPICHO-S™ (Gibco, A29127).

TABLE 26

| | | SEQ |
|---|---|---|
| Name | Sequence | ID NO |
| Fc-Hole- | DKTHTCPPCPAPELLGGPDVFLFPPKPKDTLMISRTPEVTCVVVDVSH | 42 |
| S239D-I332E | EDPEVKFNWYVDGVEVHNAKTKPREEQYNSTYRVVSVLTVLHQDW | |
| | LNGKEYKCKVSNKALPAPEEKTISKAKGQPREPQVCTLPPSREEMTK | |
| | NQVSLSCAVKGFYPSDIAVEWESNGQPENNYKTTPPVLDSDGSFFLV | |
| | SKLTVDKSRWQQGNVFSCSVMHEALHNHYTQKSLSLSPGK | |
| TraH-G44C- | EVQLVESGGGLVQPGGSLRLSCAASGFNIKDTYIHWVRQAPGKCLE | 43 |
| Knob-S239D- | WVARIYPTNGYTRYADSVKGRFTISADTSKNTAYLQMNSLRAEDTA | |
| I332E | VYYCSRWGGDGFYAMDYWGQGTLVTVSSASTKGPSVFPLAPSSKST | |
| | SGGTAALGCLVKDYFPEPVTVSWNSGALTSGVHTFPAVLQSSGLYSL | |
| | SSVVTVPSSSLGTQTYICNVNHKPSNTKVDKKVEPKSCDKTHTCPPCP | |
| | APELLGGPDVFLFPPKPKDTLMISRTPEVTCVVVDVSHEDPEVKFNW | |
| | YVDGVEVHNAKTKPREEQYNSTYRVVSVLTVLHQDWLNGKEYKCK | |
| | VSNKALPAPEEKTISKAKGQPREPQVYTLPPCREEMTKNQVSLWCLV | |
| | KGFYPSDIAVEWESNGQPENNYKTTPPVLDSDGSFFLYSKLTVDKSR | |
| | WQQGNVFSCSVMHEALHNHYTQKSLSLSPGK | |
| TraL-Q100C- | DIQMTQSPSSLSASVGDRVTITCRASQDVNTAVAWYQQKPGKAPKL | 44 |
| Knob-S239D- | LIYSASFLYSGVPSRFSGSRSGTDFTLTISSLQPEDFATYYCQQHYTTP | |
| I332E | PTFGCGTKVEIKRTVAAPSVFIFPPSDEQLKSGTASVVCLLNNFYPRE | |
| | AKVQWKVDNALQSGNSQESVTEQDSKDSTYSLSSTLTLSKADYEKH | |
| | KVYACEVTHQGLSSPVTKSFNRGECGGGGSGGGGSGGGGSEPKSSD | |
| | KTHTCPPCPAPELLGGPDVFLFPPKPKDTLMISRTPEVTCVVVDVSHE | |
| | DPEVKFNWYVDGVEVHNAKTKPREEQYNSTYRVVSVLTVLHQDWL | |
| | NGKEYKCKVSNKALPAPEEKTISKAKGQPREPQVYTLPPCREEMTKN | |
| | QVSLWCLVKGFYPSDIAVEWESNGQPENNYKTTPPVLDSDGSFFLYS | |
| | KLTVDKSRWQQGNVFSCSVMHEALHNHYTQKSLSLSPGK | |
| PerH-G44C- | EVQLVESGGGLVQPGGSLRLSCAASGFTFTDYTMDWVRQAPGKCLE | 45 |
| Knob-S239D- | WVADVNPNSGGSIYNQRFKGRFTLSVDRSKNTLYLQMNSLRAEDTA | |
| I332E | VYYCARNLGPSFYFDYWGQGTLVTVSSASTKGPSVFPLAPSSKSTSG | |
| | GTAALGCLVKDYFPEPVTVSWNSGALTSGVHTFPAVLQSSGLYSLSS | |
| | VVTVPSSSLGTQTYICNVNHKPSNTKVDKKVEPKSCDKTHTCPPCPA | |
| | PELLGGPDVFLFPPKPKDTLMISRTPEVTCVVVDVSHEDPEVKFNWY | |
| | VDGVEVHNAKTKPREEQYNSTYRVVSVLTVLHQDWLNGKEYKCKV | |
| | SNKALPAPEEKTISKAKGQPREPQVYTLPPCREEMTKNQVSLWCLVK | |
| | GFYPSDIAVEWESNGQPENNYKTTPPVLDSDGSFFLYSKLTVDKSRW | |
| | QQGNVFSCSVMHEALHNHYTQKSLSLSPGK | |
| PerL-Q100C- | DIQMTQSPSSLSASVGDRVTITCKASQDVSIGVAWYQQKPGKAPKLLI | 46 |
| Knob-S239D- | YSASYRYTGVPSRFSGSGSGTDFTLTISSLQPEDFATYYCQQYYIYPY | |
| I332E | TFGCGTKVEIKRTVAAPSVFIFPPSDEQLKSGTASVVCLLNNFYPREA | |
| | KVQWKVDNALQSGNSQESVTEQDSKDSTYSLSSTLTLSKADYEKHK | |
| | VYACEVTHQGLSSPVTKSFNRGECGGGGSGGGGSGGGGSEPKSSDK | |
| | THTCPPCPAPELLGGPDVFLFPPKPKDTLMISRTPEVTCVVVDVSHED | |
| | PEVKFNWYVDGVEVHNAKTKPREEQYNSTYRVVSVLTVLHQDWLN | |
| | GKEYKCKVSNKALPAPEEKTISKAKGQPREPQVYTLPPCREEMTKNQ | |
| | VSLWCLVKGFYPSDIAVEWESNGQPENNYKTTPPVLDSDGSFFLYSK | |
| | LTVDKSRWQQGNVFSCSVMHEALHNHYTQKSLSLSPGK | |

TABLE 27

| Name | Sequence | SEQ ID NO |
|---|---|---|
| Fc-Hole- | GACAAAACTCACACATGCCCACCGTGCCCAGCACCTGAACTCCTG | 479 |
| S239D-I332E | GGGGGACCGGATGTCTTCCTCTTCCCCCCAAAACCCAAGGACACC | 480 |
| | CTCATGATCTCCCGGACCCCTGAGGTCACATGCGTGGTGGTGGAC | |
| | GTGAGCCACGAAGACCCTGAGGTCAAGTTCAACTGGTACGTGGAC | |
| | GGCGTGGAGGTGCATAATGCCAAGACAAAGCCGCGGGAGGAGCA | |
| | GTACAACAGCACGTACCGTGTGGTCAGCGTCCTCACCGTCCTGCA | |
| | CCAGGACTGGCTGAATGGCAAGGAGTACAAGTGCAAGGTCTCCA | |
| | ACAAAGCCCTCCCAGCCCCCGAAGAGAAAACCATCTCCAAAGCC | |
| | AAAGGGCAGCCCCGAGAACCACAGGTGTGCACCCTGCCCCCATCC | |
| | CGGGAGGAGATGACCAAGAACCAGGTCAGCCTGAGCTGCGCGGT | |
| | CAAAGGCTTCTATCCCAGCGACATCGCCGTGGAGTGGGAGAGCAA | |
| | TGGGCAGCCGGAGAACAACTACAAGACCACGCCTCCCGTGCTGG | |
| | ACTCCGACGGCTCCTTCTTCCTCGTGAGCAAGCTCACCGTGGACA | |
| | AGAGCAGGTGGCAGCAGGGGAACGTCTTCTCATGCTCCGTGATGC | |
| | ATGAGGCTCTGCACAACCACTACACGCAGAAGAGCCTCTCCCTGT | |
| | CTCCGGGTAAA | |
| TraH-G44C- | GAAGTTCAACTTGTGGAGTCTGGAGGCGGTTTGGTACAACCTGGA | |
| Knob-S239D- | GGTTCACTTCGTTTGTCATGTGCTGCCTCTGGGTTTAATATCAAGG | |
| I332E | ATACTTATATTCATTGGGTTCGCCAGGCACCCGGAAAATGCCTGG | |
| | AATGGGTGGCCCGTATATATCCCACTAACGGTTACACTCGATATG | |
| | CTGACTCTGTAAAGGGTCGATTTACTATATCCGCTGATACTAGCAA | |
| | AAACACTGCCTACCTCCAGATGAACAGTCTGCGCGCCGAGGATAC | |
| | AGCAGTTTATTATTGTTCCCGATGGGGAGGTGACGGGTTCTATGCC | |
| | ATGGACTACTGGGGTCAAGGGACACTGGTAACCGTTTCTTCTGCT | |
| | AGCACCAAAGGACCTAGTGTTTTTCCTCTTGCCCCTTCCTCAAAGT | |
| | CTACCTCTGGGGGGACAGCCGCTCTGGGCTGCCTGGTCAAGGATT | |
| | ATTTCCCAGAGCCTGTCACTGTCAGTTGGAACTCTGGAGCCTTGAC | |
| | TTCTGGTGTTCATACATTTCCTGCTGTCCTTCAAAGCAGCGGCTTG | |
| | TACTCATTGTCTTCTGTTGTGACAGTACCCTCAAGCAGCCTCGGCA | |
| | CTCAGACATACATCTGCAATGTCAACCACAAACCCTCAAATACAA | |
| | AGGTAGATAAAAAAGTCGAACCAAAGTCTTGTGACAAAACTCAC | |
| | ACGTGCCCACCGTGCCCAGCACCTGAACTCCTGGGGGGACCGGAT | |
| | GTCTTCCTCTTCCCCCCAAAACCCAAGGACACCCTCATGATCTCCC | |
| | GGACCCCTGAGGTCACATGCGTGGTGGTGGACGTGAGCCACGAA | |
| | GACCCTGAGGTCAAGTTCAACTGGTACGTGGACGGCGTGGAGGTG | |
| | CATAATGCCAAGACAAAGCCGCGGGAGGAGCAGTACAACAGCAC | |
| | GTACCGTGTGGTCAGCGTCCTCACCGTCCTGCACCAGGACTGGCT | |
| | GAATGGCAAGGAGTACAAGTGCAAGGTCTCCAACAAAGCCCTCC | |
| | CAGCCCCCGAAGAGAAAACCATCTCCAAAGCCAAAGGGCAGCCC | |
| | CGAGAACCACAGGTGTACACCCTGCCCCCATGCCGGGAGGAGAT | |
| | GACCAAGAACCAGGTCAGCCTGTGGTGCCTGGTCAAAGGCTTCTA | |
| | TCCCAGCGACATCGCCGTGGAGTGGGAGAGCAATGGGCAGCCGG | |
| | AGAACAACTACAAGACCACGCCTCCCGTGCTGGACTCCGACGGCT | |
| | CCTTCTTCCTCTACAGCAAGCTCACCGTGGACAAGAGCAGGTGGC | |
| | AGCAGGGGAACGTCTTCTCATGCTCCGTGATGCATGAGGCTCTGC | |
| | ACAACCACTACACGCAGAAGAGCCTCTCCCTGTCTCCGGGTAAA | |
| TraL-Q100C- | GACATTCAGATGACCCAATCCCCCTCTAGCCTTTCAGCCTCCGTAG | 481 |
| Knob-S239D- | GGGACAGAGTTACAATAACCTGTAGGGCTAGTCAGGACGTTAATA | |
| I332E | CAGCAGTCGCATGGTACCAGCAGAAGCCCGGTAAGGCTCCTAAGCT | |
| | TTTGATCTACAGTGCTTCTTTCCTGTATTCTGGTGTACCTAGCCGA | |
| | TTCTCAGGCTCTCGGAGTGGCACAGACTTCACTCTGACAATTTCAA | |
| | GTCTCCAGCCAGAAGATTTTGCAACCTACTACTGCCAACAACACT | |
| | ACACTACTCCTCCAACCTTCGGATGTGGCACAAAAGTAGAGATTA | |
| | AGCGTACGGTGGCAGCTCCCAGCGTTTTTATCTTTCCCCCATCCGA | |
| | CGAGCAGCTCAAGAGTGGCACTGCCTCTGTAGTTTGTTTGCTGAAT | |
| | AACTTCTATCCACGTGAAGCAAAAGTACAGTGGAAGGTCGATAAT | |
| | GCCCTTCAGAGCGGTAACAGCCAAGAAAGTGTTACCGAGCAAGA | |
| | TTCCAAAGATTCCACTTACAGTCTGTCCAGCACATTGACACTGAGT | |
| | AAGGCTGATTACGAAAAACACAAGGTGTACGCATGCGAGGTGAC | |
| | ACACCAAGGTCTTTCATCTCCTGTAACTAAGAGCTTTAACCGGGG | |
| | AGAATGTGGTGGTGGGGGCAGCGGGGGCGGAGGTAGTGGAGGCG | |
| | GCGGTAGTGAACCAAAGAGTAGTGACAAAACTCACACGTGCCCA | |
| | CCGTGCCCAGCACCTGAACTCCTGGGGGGACCGGATGTCTTCCTC | |
| | TTCCCCCCAAAACCCAAGGACACCCTCATGATCTCCCGGACCCCT | |
| | GAGGTCACATGCGTGGTGGTGGACGTGAGCCACGAAGACCCTGA | |
| | GGTCAAGTTCAACTGGTACGTGGACGGCGTGGAGGTGCATAATGC | |
| | CAAGACAAAGCCGCGGGAGGAGCAGTACAACAGCACGTACCGTG | |
| | TGGTCAGCGTCCTCACCGTCCTGCACCAGGACTGGCTGAATGGCA | |
| | AGGAGTACAAGTGCAAGGTCTCCAACAAAGCCCTCCCAGCCCCCG | |
| | AAGAGAAAACCATCTCCAAAGCCAAAGGGCAGCCCCGAGAACCA | |
| | CAGGTGTACACCCTGCCCCCATGCCGGGAGGAGATGACCAAGAA | |
| | CCAGGTCAGCCTGTGGTGCCTGGTCAAAGGCTTCTATCCCAGCGA | |
| | CATCGCCGTGGAGTGGGAGAGCAATGGGCAGCCGGAGAACAACT | |
| | ACAAGACCACGCCTCCCGTGCTGGACTCCGACGGCTCCTTCTTCCT | |
| | CTACAGCAAGCTCACCGTGGACAAGAGCAGGTGGCAGCAGGGGA | |
| | ACGTCTTCTCATGCTCCGTGATGCATGAGGCTCTGCACAACCACTA | |
| | CACGCAGAAGAGCCTCTCCCTGTCTCCGGGTAAA | |
| PerH-G44C- | GAAGTACAGTTGGTGGAGTCTGGTGGAGGTCTTGTACAACCTGGC | 482 |
| Knob-S239D- | GGGAGTTTGCGGCTTTCCTGCGCTGCAAGCGGGTTTACCTTCACCG | |
| I332E | ATTATACCATGGATTGGGTACGCCAAGCCCCTGGTAAGTGCCTTG | |
| | AGTGGGTTGCCGATGTAAACCCTAATTCCGGAGGAAGTATCTATA | |
| | ATCAACGCTTCAAGGGCCGATTCACTCTGAGTGTGGATCGAAGCA | |
| | AGAACACCTTGTACTTGCAGATGAATTCCTTGCGGGCTGAAGACA | |
| | CAGCCGTCTATTACTGCGCCCGAAATTTGGGGCCTTCATTCTATTT | |
| | TGACTATTGGGGTCAGGGAACTCTGGTAACTGTTTCAAGTGCTAG | |
| | CACCAAAGGACCTAGTGTTTTTCCTCTTGCCCCTTCCTCAAAGTCT | |
| | ACCTCTGGGGGGACAGCCGCTCTGGGCTGCCTGGTCAAGGATTAT | |
| | TTCCCAGAGCCTGTCACTGTCAGTTGGAACTCTGGAGCCTTGACTT | |
| | CTGGTGTTCATACATTTCCTGCTGTCCTTCAAAGCAGCGGCTTGTA | |
| | CTCATTGTCTTCTGTTGTGACAGTACCCTCAAGCAGCCTCGGCACT | |
| | CAGACATACATCTGCAATGTCAACCACAAACCCTCAAATACAAAG | |
| | GTAGATAAAAAAGTCGAACCAAAGTCTTGTGACAAAACTCACAC | |
| | GTGCCCACCGTGCCCAGCACCTGAACTCCTGGGGGGACCGGATGT | |
| | CTTCCTCTTCCCCCCAAAACCCAAGGACACCCTCATGATCTCCCGG | |
| | ACCCCTGAGGTCACATGCGTGGTGGTGGACGTGAGCCACGAAGAC | |
| | CCTGAGGTCAAGTTCAACTGGTACGTGGACGGCGTGGAGGTGCAT | |
| | AATGCCAAGACAAAGCCGCGGGAGGAGCAGTACAACAGCACGTA | |
| | CCGTGTGGTCAGCGTCCTCACCGTCCTGCACCAGGACTGGCTGAA | |
| | TGGCAAGGAGTACAAGTGCAAGGTCTCCAACAAAGCCCTCCCAGC | |
| | CCCCGAAGAGAAAACCATCTCCAAAGCCAAAGGGCAGCCCCGAG | |
| | AACCACAGGTGTACACCCTGCCCCCATGCCGGGAGGAGATGACCA | |
| | AGAACCAGGTCAGCCTGTGGTGCCTGGTCAAAGGCTTCTATCCCA | |
| | GCGACATCGCCGTGGAGTGGGAGAGCAATGGGCAGCCGGAGAAC | |
| | AACTACAAGACCACGCCTCCCGTGCTGGACTCCGACGGCTCCTTC | |
| | TTCCTCTACAGCAAGCTCACCGTGGACAAGAGCAGGTGGCAGCAG | |
| | GGGAACGTCTTCTCATGCTCCGTGATGCATGAGGCTCTGCACAAC | |
| | CACTACACGCAGAAGAGCCTCTCCCTGTCTCCGGGTAAA | |
| PerL-Q100C- | GATATTCAAATGACCCAAAGTCCAAGTTCCCTTTCAGCATCTGTCG | 483 |
| Knob-S239D- | GTGATCGAGTCACTATAACTTGTAAGGCCAGCCAAGACGTTAGCA | |
| I332E | TAGGAGTAGCATGGTACCAACAAAAGCCTGGGAAGGCTCCCAAA | |
| | CTTCTCATTTATTCTGCTTCCTACCGATATACTGGTGTCCCAAGTA | |
| | GATTTTCTGGCAGCGGATCTGGAACTGATTTTACATTGACTATCAG | |
| | CTCCCTCCAGCCTGAGGACTTCGCTACTTATTACTGCCAACAGTAC | |
| | TACATTTATCCCTATACATTCGGTTGTGGGACCAAAGTAGAGATC | |
| | AAACGTACGGTGGCAGCTCCCAGCGTTTTTATCTTTCCCCCATCCG | |
| | ACGAGCAGCTCAAGAGTGGCACTGCCTCTGTAGTTTGTTTGCTGA | |
| | ATAACTTCTATCCACGTGAAGCAAAAGTACAGTGGAAGGTCGATA | |
| | ATGCCCTTCAGAGCGGTAACAGCCAAGAAAGTGTTACCGAGCAA | |
| | GATTCCAAAGATTCCACTTACAGTCTGTCCAGCACATTGACACTG | |
| | AGTAAGGCTGATTACGAAAAACACAAGGTGTACGCATGCGAGGT | |
| | GACACACCAAGGTCTTTCATCTCCTGTAACTAAGAGCTTTAACCG | |
| | GGGAGAATGTGGTGGTGGGGGCAGCGGGGGCGGAGGTAGTGGAG | |
| | GCGGCGGTAGTGAACCAAAGAGTAGTGACAAAACTCACACGTGC | |
| | CCACCGTGCCCAGCACCTGAACTCCTGGGGGGACCGGATGTCTTC | |
| | CTCTTCCCCCCAAAACCCAAGGACACCCTCATGATCTCCCGGACC | |
| | CCTGAGGTCACATGCGTGGTGGTGGACGTGAGCCACGAAGACCCT | |
| | GAGGTCAAGTTCAACTGGTACGTGGACGGCGTGGAGGTGCATAAT | |
| | GCCAAGACAAAGCCGCGGGAGGAGCAGTACAACAGCACGTACCG | |
| | TGTGGTCAGCGTCCTCACCGTCCTGCACCAGGACTGGCTGAATGG | |
| | CAAGGAGTACAAGTGCAAGGTCTCCAACAAAGCCCTCCCAGCCCC | |
| | CGAAGAGAAAACCATCTCCAAAGCCAAAGGGCAGCCCCGAGAAC | |
| | CACAGGTGTACACCCTGCCCCCATGCCGGGAGGAGATGACCAAG | |
| | AACCAGGTCAGCCTGTGGTGCCTGGTCAAAGGCTTCTATCCCAGC | |
| | GACATCGCCGTGGAGTGGGAGAGCAATGGGCAGCCGGAGAACAA | |
| | CTACAAGACCACGCCTCCCGTGCTGGACTCCGACGGCTCCTTCTTC | |
| | CTCTACAGCAAGCTCACCGTGGACAAGAGCAGGTGGCAGCAGGG | |
| | GAACGTCTTCTCATGCTCCGTGATGCATGAGGCTCTGCACAACCA | |
| | CTACACGCAGAAGAGCCTCTCCCTGTCTCCGGGTAAA | |

[0340] Binding characteristics were analyzed at 25° C. using Octet Red96e (Sartorius), a bio-layer interferometry (BLI). The buffer used for analysis was 10× Kinetics Buffer (Sartorius, 18-1042) diluted in PBS pH 7.4 (Gibco, 10010), and analysis plate was agitated at 1,000 rpm. The human HER2 recombinant protein (R&D systems, 1129-ER) was loaded onto the Anti-Penta-HIS (HIS1K) biosensor (Sartorius, 18-5120). To measure the binding rate constant (Kₐ), 1 to 32 nM of H01, H01DE4, P01, and P01DE4 were allowed to bind to loaded antigen for 300 seconds and then the dissociation rate constant (K_{d}) was determined after 600 seconds of dissociation in Kinetics Buffer. Kₐ and K_{d} values were measured through a 1:1 binding model in Octet analysis software (Sartorius), and the equilibrium dissociation constant (K_{D}) value was determined (FIGS. 20a to 20d, Table 28).

TABLE 28

| | K_{D}(pM) | Kₐ(1/Ms) | K_{d}(1/s) |
|---|---|---|---|
| H01 | 144.76 | 3.10 × 10⁵ | 4.49 × 10⁻⁵ |
| H01DE4 | 144.67 | 2.58 × 10⁵ | 3.73 × 10⁻⁵ |
| P01 | 338.46 | 2.72 × 10⁵ | 9.20 × 10⁻⁵ |
| P01DE4 | 223.78 | 2.46 × 10⁵ | 5.51 × 10⁻⁵ |

### Example 10. Analysis of Antibody Binding Affinity to Fcγ Receptors

[0341] The binding constants of each antibody to Fcγ receptors at 25° C. were analyzed using Octet Red96e (Sartorius). Anti-Penta-HIS (HIS1K) biosensor (Sartorius, 18-5120) was used, and human FcγRI (R&D systems, 1257-FC) or human FcγIIA (R&D systems, 1330-CD) or human FcγRIIIA (176V isoform, R&D systems, 4325-FC) containing a His tag were loaded onto the biosensor.

[0342] The association rate constants (Kₐ) and the dissociation rate constants (K_{d}) of H01, P01, H01DE4, P01DE4, human IgG1 (Bio X cell, BE0297), trastuzumab, pertuzumab, and margetuximab to the biosensor loaded with an antigen was determined. Kₐ and K_{d} values were calculated through a 1:1 binding model in Octet analysis software (Sartorius), and the equilibrium dissociation constant (K_{D}) value was determined (FIGS. 21a to 21h, FIGS. 22a to 22h, FIGS. 23a to 23h, Table 29).

TABLE 29

| | FcγRI(CD64) | | | FcγRIIA(CD32A, 131R) | | | FcγRIIIA(CD16A, 176V) | | |
|---|---|---|---|---|---|---|---|---|---|
| Antigen | KD | Ka | Kd | KD | Ka | Kd | KD | Ka | Kd |
| Antibody | (nM) | (1/Ms) | (1/s) | (nM) | (1/Ms) | (1/s) | (nM) | (1/Ms) | (1/s) |
| H01 | 0.054 | 8.67E+05 | 4.70E−05 | 7.73 | 8.68E+05 | 6.71E−03 | 2.08 | 8.17E+05 | 1.70E−03 |
| P01 | 0.058 | 9.95E+05 | 5.75E−05 | 6.04 | 1.03E+06 | 6.22E−03 | 2.37 | 6.36E+05 | 1.51E−03 |
| H01DE4 | 0.036 | 8.52E+05 | 3.06E−05 | 3.62 | 4.83E+05 | 1.75E−03 | 0.10 | 5.26E+05 | 5.51E−05 |
| P01DE4 | 0.038 | 7.48E+05 | 2.85E−05 | 4.71 | 4.20E+05 | 1.98E−03 | 0.33 | 4.78E+05 | 1.59E−04 |
| Human IgG1 | 2.457 | 3.59E+05 | 8.82E−04 | 310.45 | 2.01E+05 | 6.24E−02 | 197.84 | 1.39E+05 | 2.75E−02 |
| Trastuzumab | 2.342 | 3.33E+05 | 7.80E−04 | 151.82 | 7.97E+04 | 1.21E−02 | 103.21 | 1.56E+05 | 1.61E−02 |
| Pertuzumab | 3.042 | 3.32E+05 | 1.01E−03 | 359.01 | 7.27E+04 | 2.61E−02 | 211.65 | 1.03E+05 | 2.18E−02 |
| Margetuximab | 5.563 | 3.11E+05 | 1.73E−03 | 17.23 | 1.37E+05 | 2.36E−03 | 126.28 | 1.37E+05 | 1.73E−02 |

### Example 11. Pharmacokinetic (PK) Analysis in Rats

[0343] H01, P01 trastuzumab, and pertuzumab were administered at 10 mg/kg to 7-week-old male Sprague-Dawley rats (ORIENT BIO INC.) via the intravenous (i.v.) route. Blood samples were collected in 5 minutes, 15 minutes, 30 minutes, 1 hour, 2 hours, 4 hours, 8 hours, 1 day, 2 days, 3 days, 7 days, 10 days, 14 days, 21 days, 28 days, 35 days, and 42 days after administration. Thereafter, only the serum was separated from the blood for analysis. The antibody concentration in serum was measured by ELISA.

[0344] Briefly, a 96-well ELISA plate (Corning, 3590) was coated with human HER2 recombinant protein (R&D systems, 1129-ER) and stored overnight at 4° C., and the sera obtained at each time were appropriately diluted, and allowed to bind to the coated human HER2. Peroxidase-conjugated anti-human Fab goat antibody (Invitrogen, 31482) was used to detect H01, P01 trastuzumab, and pertuzumab.

[0345] Standard samples of H01, P01, trastuzumab, and pertuzumab were prepared, and the concentrations of the analytes at each time point were quantified based on a standard curve created from naive rat serum containing different concentrations of the antibody standards. The half-lives of intravenously administered H01, P01, trastuzumab, and pertuzumab were determined to be approximately 11.8 days, 14.2 days, 7.3 days, and 11.6 days, respectively (FIGS. 24a and 24b, Table 30). The engineered novel antibodies, H01 and P01, were found to have similar PK parameters to the parental humanized antibodies trastuzumab and pertuzumab.

TABLE 30

| | Trastuzumab | Pertuzumab | H01 | P01 |
|---|---|---|---|---|
| Dose (mg/kg), | 10, IV | 10, IV | 10, IV | 10, IV |
| Route | | | | |
| T_{1/2} (day) | 7.3 ± 4.3 | 11.6 ± 2.2 | 11.8 ± 1.9 | 14.2 ± 3.7 |
| AUCₗₐₛₜ | 1802 ± 320 | 1822 ± 172 | 950 ± 22 | 1206 ± 73 |
| (μg*day/mL) | | | | |
| AUC_{inf} | 1875 ± 295 | 1968 ± 250 | 1018 ± 30 | 1316 ± 47 |
| (μg*day/mL) | | | | |
| Vz_obs | 59.1 ± 37.7 | 84.8 ± 8.9 | 167 ± 22 | 156 ± 43 |
| (mL/kg) | | | | |
| Cl_obs | 5.4 ± 0.9 | 5.1 ± 0.7 | 9.8 ± 0.3 | 7.6 ± 0.3 |
| (mL/day/kg) | | | | |
| MRT_{inf} (day) | 11.6 ± 3.8 | 14.9 ± 2.4 | 14.8 ± 1.1 | 15.7 ± 2.3 |

### Example 12. Design, Preparation and Analysis of Novel Antibody that Recognizes Two Epitopes of HER2

[0346] In order to construct an antibody that recognizes two epitopes of HER2 protein, a biparatopic antibody HP51 was designed by connecting the V domains of trastuzumab and pertuzumab via a linker (FIG. 25). In order to minimize the decrease in binding affinity due to interference between different V domains, linkers with variable lengths connecting the V domains were tested. At the same time, as an attempt to improve the physical integrity of the antibody, 16 variants were designed in which Cys substitution mutations capable of forming a disulfide bond in the V domain were introduced (FIG. 26, Table 31). According to Kabat numbering system, mutations were introduced only at position 44 for the heavy chain and position 100 for the light chain (Table 31). In Table 31, the VH linker with 6 amino acid residues was designated as VH-S-Linker, the VH linker with 13 amino acid residues was designated as VH-L-Linker, the VL linker with 6 amino acid residues was designated as VL-S-Linker, and the VL linker with 13 amino acid residues was designated as VL-L-Linker.

TABLE 31

| | VH domain | | | VH domain | | |
|---|---|---|---|---|---|---|
| Clone | VH1 44 | Linker | VH2 44 | VL1 100 | Linker | VL2 100 |
| name | (Upper) | length | (Lower) | (Upper) | length | (Lower) |
| HP501 | Gly (G) | 6 | Gly (G) | Gln (Q) | 6 | Gln (Q) |
| HP502 | Cys (C) | 6 | Gly (G) | Cys (C) | 6 | Gln (Q) |
| HP503 | Gly (G) | 6 | Cys (C) | Gln (Q) | 6 | Cys (C) |
| HP504 | Cys (C) | 6 | Cys (C) | Cys (C) | 6 | Cys (C) |
| HP505 | Gly (G) | 6 | Gly (G) | Gln (Q) | 13 | Gln (Q) |
| HP506 | Cys (C) | 6 | Gly (G) | Cys (C) | 13 | Gln (Q) |
| HP507 | Gly (G) | 6 | Cys (C) | Gln (Q) | 13 | Cys (C) |
| HP508 | Cys (C) | 6 | Cys (C) | Cys (C) | 13 | Cys (C) |
| HP509 | Gly (G) | 13 | Gly (G) | Gln (Q) | 6 | Gln (Q) |
| HP510 | Cys (C) | 13 | Gly (G) | Cys (C) | 6 | Gln (Q) |
| HP511 | Gly (G) | 13 | Cys (C) | Gln (Q) | 6 | Cys (C) |
| HP512 | Cys (C) | 13 | Cys (C) | Cys (C) | 6 | Cys (C) |
| HP513 | Gly (G) | 13 | Gly (G) | Gln (Q) | 13 | Gln (Q) |
| HP514 | Cys (C) | 13 | Gly (G) | Cys (C) | 13 | Gln (Q) |
| HP515 | Gly (G) | 13 | Cys (C) | Gln (Q) | 13 | Cys (C) |
| HP516 | Cys (C) | 13 | Cys (C) | Cys (C) | 13 | Cys (C) |

[0347] For HP51, expression vectors consisting of the sequences corresponding to Fc-Hole (SEQ ID NO: 7), TN-S-PH-Knob (SEQ ID NO: 51), and TL-S-PL-Knob (SEQ ID NO: 59) were co-transfected into EXPICHO-S™ (Gibco, A29127) (Tables 31, 32, 33, and 34), and purification and analysis were performed in the same manner as described in Example 1. Expression, purification and analysis were performed for HP502 to HP516 in the same manner as mentioned above, and the composition of the expression vector is shown in detail

TABLE 32

| | | SEQ |
|---|---|---|
| Name | Sequence | ID NO |
| VH-S-Linker | ASTKGP | 47 |
| VH-L-Linker | ASTKGPSVFPLAP | 48 |
| VL-S-Linker | RTVAAP | 49 |
| VL-L-Linker | RTVAAPSVFIFPP | 50 |
| TH-S- | EVQLVESGGGLVQPGGSLRLSCAASGFNIKDTYIHWVRQAPGKGLE | 51 |
| PH-Knob | WVARIYPTNGYTRYADSVKGRFTISADTSKNTAYLQMNSLRAEDTA | |
| | VYYCSRWGGDGFYAMDYWGQGTLVTVSSASTKGPEVQLVESGGGL | |
| | VQPGGSLRLSCAASGFTFTDYTMDWVRQAPGKGLEWVADVNPNSG | |
| | GSIYNQRFKGRFTLSVDRSKNTLYLQMNSLRAEDTAVYYCARNLGPS | |
| | FYFDYWGQGTLVTVSSASTKGPSVFPLAPSSKSTSGGTAALGCLVKD | |
| | YFPEPVTVSWNSGALTSGVHTFPAVLQSSGLYSLSSVVTVPSSSLGTQ | |
| | TYICNVNHKPSNTKVDKKVEPKSCDKTHTCPPCPAPELLGGPSVFLFP | |
| | PKPKDTLMISRTPEVTCVVVDVSHEDPEVKFNWYVDGVEVHNAKTK | |
| | PREEQYNSTYRVVSVLTVLHQDWLNGKEYKCKVSNKALPAPIEKTIS | |
| | KAKGQPREPQVYTLPPCREEMTKNQVSLWCLVKGFYPSDIAVEWES | |
| | NGQPENNYKTTPPVLDSDGSFFLYSKLTVDKSRWQQGNVFSCSVMH | |
| | EALHNHYTQKSLSLSPGK | |
| THC-S- | EVQLVESGGGLVQPGGSLRLSCAASGFNIKDTYIHWVRQAPGKCLE | 52 |
| PH-Knob | WVARIYPTNGYTRYADSVKGRFTISADTSKNTAYLQMNSLRAEDTA | |
| | VYYCSRWGGDGFYAMDYWGQGTLVTVSSASTKGPEVQLVESGGGL | |
| | VQPGGSLRLSCAASGFTFTDYTMDWVRQAPGKGLEWVADVNPNSG | |
| | GSIYNQRFKGRFTLSVDRSKNTLYLQMNSLRAEDTAVYYCARNLGPS | |
| | FYFDYWGQGTLVTVSSASTKGPSVFPLAPSSKSTSGGTAALGCLVKD | |
| | YFPEPVTVSWNSGALTSGVHTFPAVLQSSGLYSLSSVVTVPSSSLGTQ | |
| | TYICNVNHKPSNTKVDKKVEPKSCDKTHTCPPCPAPELLGGPSVFLFP | |
| | PKPKDTLMISRTPEVTCVVVDVSHEDPEVKFNWYVDGVEVHNAKTK | |
| | PREEQYNSTYRVVSVLTVLHQDWLNGKEYKCKVSNKALPAPIEKTIS | |
| | KAKGQPREPQVYTLPPCREEMTKNQVSLWCLVKGFYPSDIAVEWES | |
| | NGQPENNYKTTPPVLDSDGSFFLYSKLTVDKSRWQQGNVFSCSVMH | |
| | EALHNHYTQKSLSLSPGK | |
| TH-S- | EVQLVESGGGLVQPGGSLRLSCAASGFNIKDTYIHWVRQAPGKGLE | 53 |
| PHC-Knob | WVARIYPTNGYTRYADSVKGRFTISADTSKNTAYLQMNSLRAEDTA | |
| | VYYCSRWGGDGFYAMDYWGQGTLVTVSSASTKGPEVQLVESGGGL | |
| | VQPGGSLRLSCAASGFTFTDYTMDWVRQAPGKCLEWVADVNPNSG | |
| | GSIYNQRFKGRFTLSVDRSKNTLYLQMNSLRAEDTAVYYCARNLGPS | |
| | FYFDYWGQGTLVTVSSASTKGPSVFPLAPSSKSTSGGTAALGCLVKD | |
| | YFPEPVTVSWNSGALTSGVHTFPAVLQSSGLYSLSSVVTVPSSSLGTQ | |
| | TYICNVNHKPSNTKVDKKVEPKSCDKTHTCPPCPAPELLGGPSVFLFP | |
| | PKPKDTLMISRTPEVTCVVVDVSHEDPEVKFNWYVDGVEVHNAKTK | |
| | PREEQYNSTYRVVSVLTVLHQDWLNGKEYKCKVSNKALPAPIEKTIS | |
| | KAKGQPREPQVYTLPPCREEMTKNQVSLWCLVKGFYPSDIAVEWES | |
| | NGQPENNYKTTPPVLDSDGSFFLYSKLTVDKSRWQQGNVFSCSVMH | |
| | EALHNHYTQKSLSLSPGK | |
| THC-S- | EVQLVESGGGLVQPGGSLRLSCAASGFNIKDTYIHWVRQAPGKCLE | 54 |
| PHC-Knob | WVARIYPTNGYTRYADSVKGRFTISADTSKNTAYLQMNSLRAEDTA | |
| | VYYCSRWGGDGFYAMDYWGQGTLVTVSSASTKGPEVQLVESGGGL | |
| | VQPGGSLRLSCAASGFTFTDYTMDWVRQAPGKCLEWVADVNPNSG | |
| | GSIYNQRFKGRFTLSVDRSKNTLYLQMNSLRAEDTAVYYCARNLGPS | |
| | FYFDYWGQGTLVTVSSASTKGPSVFPLAPSSKSTSGGTAALGCLVKD | |
| | YFPEPVTVSWNSGALTSGVHTFPAVLQSSGLYSLSSVVTVPSSSLGTQ | |
| | TYICNVNHKPSNTKVDKKVEPKSCDKTHTCPPCPAPELLGGPSVFLFP | |
| | PKPKDTLMISRTPEVTCVVVDVSHEDPEVKFNWYVDGVEVHNAKTK | |
| | PREEQYNSTYRVVSVLTVLHQDWLNGKEYKCKVSNKALPAPIEKTIS | |
| | KAKGQPREPQVYTLPPCREEMTKNQVSLWCLVKGFYPSDIAVEWES | |
| | NGQPENNYKTTPPVLDSDGSFFLYSKLTVDKSRWQQGNVFSCSVMH | |
| | EALHNHYTQKSLSLSPGK | |
| TH-L- | EVQLVESGGGLVQPGGSLRLSCAASGFNIKDTYIHWVRQAPGKGLE | 55 |
| PH-Knob | WVARIYPTNGYTRYADSVKGRFTISADTSKNTAYLQMNSLRAEDTA | |
| | VYYCSRWGGDGFYAMDYWGQGTLVTVSSASTKGPSVFPLAPEVQL | |
| | VESGGGLVQPGGSLRLSCAASGFTFTDYTMDWVRQAPGKGLEWVA | |
| | DVNPNSGGSIYNQRFKGRFTLSVDRSKNTLYLQMNSLRAEDTAVYY | |
| | CARNLGPSFYFDYWGQGTLVTVSSASTKGPSVFPLAPSSKSTSGGTA | |
| | ALGCLVKDYFPEPVTVSWNSGALTSGVHTFPAVLQSSGLYSLSSVVT | |
| | VPSSSLGTQTYICNVNHKPSNTKVDKKVEPKSCDKTHTCPPCPAPELL | |
| | GGPSVFLFPPKPKDTLMISRTPEVTCVVVDVSHEDPEVKFNWYVDGV | |
| | EVHNAKTKPREEQYNSTYRVVSVLTVLHQDWLNGKEYKCKVSNKA | |
| | LPAPIEKTISKAKGQPREPQVYTLPPCREEMTKNQVSLWCLVKGFYPS | |
| | DIAVEWESNGQPENNYKTTPPVLDSDGSFFLYSKLTVDKSRWQQGN | |
| | VFSCSVMHEALHNHYTQKSLSLSPGK | |
| THC-L- | EVQLVESGGGLVQPGGSLRLSCAASGFNIKDTYIHWVRQAPGKCLE | 56 |
| PH-Knob | WVARIYPTNGYTRYADSVKGRFTISADTSKNTAYLQMNSLRAEDTA | |
| | VYYCSRWGGDGFYAMDYWGQGTLVTVSSASTKGPSVFPLAPEVQL | |
| | VESGGGLVQPGGSLRLSCAASGFTFTDYTMDWVRQAPGKGLEWVA | |
| | DVNPNSGGSIYNQRFKGRFTLSVDRSKNTLYLQMNSLRAEDTAVYY | |
| | CARNLGPSFYFDYWGQGTLVTVSSASTKGPSVFPLAPSSKSTSGGTA | |
| | ALGCLVKDYFPEPVTVSWNSGALTSGVHTFPAVLQSSGLYSLSSVVT | |
| | VPSSSLGTQTYICNVNHKPSNTKVDKKVEPKSCDKTHTCPPCPAPELL | |
| | GGPSVFLFPPKPKDTLMISRTPEVTCVVVDVSHEDPEVKFNWYVDGV | |
| | EVHNAKTKPREEQYNSTYRVVSVLTVLHQDWLNGKEYKCKVSNKA | |
| | LPAPIEKTISKAKGQPREPQVYTLPPCREEMTKNQVSLWCLVKGFYPS | |
| | DIAVEWESNGQPENNYKTTPPVLDSDGSFFLYSKLTVDKSRWQQGN | |
| | VFSCSVMHEALHNHYTQKSLSLSPGK | |
| TH-L- | EVQLVESGGGLVQPGGSLRLSCAASGFNIKDTYIHWVRQAPGKGLE | 57 |
| PHC-Knob | WVARIYPTNGYTRYADSVKGRFTISADTSKNTAYLQMNSLRAEDTA | |
| | VYYCSRWGGDGFYAMDYWGQGTLVTVSSASTKGPSVFPLAPEVQL | |
| | VESGGGLVQPGGSLRLSCAASGFTFTDYTMDWVRQAPGKCLEWVA | |
| | DVNPNSGGSIYNQRFKGRFTLSVDRSKNTLYLQMNSLRAEDTAVYY | |
| | CARNLGPSFYFDYWGQGTLVTVSSASTKGPSVFPLAPSSKSTSGGTA | |
| | ALGCLVKDYFPEPVTVSWNSGALTSGVHTFPAVLQSSGLYSLSSVVT | |
| | VPSSSLGTQTYICNVNHKPSNTKVDKKVEPKSCDKTHTCPPCPAPELL | |
| | GGPSVFLFPPKPKDTLMISRTPEVTCVVVDVSHEDPEVKFNWYVDGV | |
| | EVHNAKTKPREEQYNSTYRVVSVLTVLHQDWLNGKEYKCKVSNKA | |
| | LPAPIEKTISKAKGQPREPQVYTLPPCREEMTKNQVSLWCLVKGFYPS | |
| | DIAVEWESNGQPENNYKTTPPVLDSDGSFFLYSKLTVDKSRWQQGN | |
| | VFSCSVMHEALHNHYTQKSLSLSPGK | |
| THC-L- | EVQLVESGGGLVQPGGSLRLSCAASGFNIKDTYIHWVRQAPGKCLE | 58 |
| PHC-Knob | WVARIYPTNGYTRYADSVKGRFTISADTSKNTAYLQMNSLRAEDTA | |
| | VYYCSRWGGDGFYAMDYWGQGTLVTVSSASTKGPSVFPLAPEVQL | |
| | VESGGGLVQPGGSLRLSCAASGFTFTDYTMDWVRQAPGKCLEWVA | |
| | DVNPNSGGSIYNQRFKGRFTLSVDRSKNTLYLQMNSLRAEDTAVYY | |
| | CARNLGPSFYFDYWGQGTLVTVSSASTKGPSVFPLAPSSKSTSGGTA | |
| | ALGCLVKDYFPEPVTVSWNSGALTSGVHTFPAVLQSSGLYSLSSVVT | |
| | VPSSSLGTQTYICNVNHKPSNTKVDKKVEPKSCDKTHTCPPCPAPELL | |
| | GGPSVFLFPPKPKDTLMISRTPEVTCVVVDVSHEDPEVKFNWYVDGV | |
| | EVHNAKTKPREEQYNSTYRVVSVLTVLHQDWLNGKEYKCKVSNKA | |
| | LPAPIEKTISKAKGQPREPQVYTLPPCREEMTKNQVSLWCLVKGFYPS | |
| | DIAVEWESNGQPENNYKTTPPVLDSDGSFFLYSKLTVDKSRWQQGN | |
| | VFSCSVMHEALHNHYTQKSLSLSPGK | |
| TL-S- | DIQMTQSPSSLSASVGDRVTITCRASQDVNTAVAWYQQKPGKAPKL | 59 |
| PL-Knob | LIYSASFLYSGVPSRFSGSRSGTDFTLTISSLQPEDFATYYCQQHYTTP | |
| | PTFGQGTKVEIKRTVAAPDIQMTQSPSSLSASVGDRVTITCKASQDVS | |
| | IGVAWYQQKPGKAPKLLIYSASYRYTGVPSRFSGSGSGTDFTLTISSL | |
| | QPEDFATYYCQQYYIYPYTFGQGTKVEIKRTVAAPSVFIFPPSDEQLK | |
| | SGTASVVCLLNNFYPREAKVQWKVDNALQSGNSQESVTEQDSKDST | |
| | YSLSSTLTLSKADYEKHKVYACEVTHQGLSSPVTKSFNRGECGGGGS | |
| | GGGGSGGGGSEPKSSDKTHTCPPCPAPELLGGPSVFLFPPKPKDTLMI | |
| | SRTPEVTCVVVDVSHEDPEVKFNWYVDGVEVHNAKTKPREEQYNST | |
| | YRVVSVLTVLHQDWLNGKEYKCKVSNKALPAPIEKTISKAKGQPREP | |
| | QVYTLPPCREEMTKNQVSLWCLVKGFYPSDIAVEWESNGQPENNYK | |
| | TTPPVLDSDGSFFLYSKLTVDKSRWQQGNVFSCSVMHEALHNHYTQ | |
| | KSLSLSPGK | |
| TLC-S- | DIQMTQSPSSLSASVGDRVTITCRASQDVNTAVAWYQQKPGKAPKL | 60 |
| PL-Knob | LIYSASFLYSGVPSRFSGSRSGTDFTLTISSLQPEDFATYYCQQHYTTP | |
| | PTFGCGTKVEIKRTVAAPDIQMTQSPSSLSASVGDRVTITCKASQDVSI | |
| | GVAWYQQKPGKAPKLLIYSASYRYTGVPSRFSGSGSGTDFTLTISSLQ | |
| | PEDFATYYCQQYYIYPYTFGQGTKVEIKRTVAAPSVFIFPPSDEQLKS | |
| | GTASVVCLLNNFYPREAKVQWKVDNALQSGNSQESVTEQDSKDSTY | |
| | SLSSTLTLSKADYEKHKVYACEVTHQGLSSPVTKSFNRGECGGGGSG | |
| | GGGSGGGGSEPKSSDKTHTCPPCPAPELLGGPSVFLFPPKPKDTLMIS | |
| | RTPEVTCVVVDVSHEDPEVKFNWYVDGVEVHNAKTKPREEQYNST | |
| | YRVVSVLTVLHQDWLNGKEYKCKVSNKALPAPIEKTISKAKGQPREP | |
| | QVYTLPPCREEMTKNQVSLWCLVKGFYPSDIAVEWESNGQPENNYK | |
| | TTPPVLDSDGSFFLYSKLTVDKSRWQQGNVFSCSVMHEALHNHYTQ | |
| | KSLSLSPGK | |
| TL-S- | DIQMTQSPSSLSASVGDRVTITCRASQDVNTAVAWYQQKPGKAPKL | 61 |
| PLC-Knob | LIYSASFLYSGVPSRFSGSRSGTDFTLTISSLQPEDFATYYCQQHYTTP | |
| | PTFGQGTKVEIKRTVAAPDIQMTQSPSSLSASVGDRVTITCKASQDVS | |
| | IGVAWYQQKPGKAPKLLIYSASYRYTGVPSRFSGSGSGTDFTLTISSL | |
| | QPEDFATYYCQQYYIYPYTFGCGTKVEIKRTVAAPSVFIFPPSDEQLK | |
| | SGTASVVCLLNNFYPREAKVQWKVDNALQSGNSQESVTEQDSKDST | |
| | YSLSSTLTLSKADYEKHKVYACEVTHQGLSSPVTKSFNRGECGGGGS | |
| | GGGGSGGGGSEPKSSDKTHTCPPCPAPELLGGPSVFLFPPKPKDTLMI | |
| | SRTPEVTCVVVDVSHEDPEVKFNWYVDGVEVHNAKTKPREEQYNST | |
| | YRVVSVLTVLHQDWLNGKEYKCKVSNKALPAPIEKTISKAKGQPREP | |
| | QVYTLPPCREEMTKNQVSLWCLVKGFYPSDIAVEWESNGQPENNYK | |
| | TTPPVLDSDGSFFLYSKLTVDKSRWQQGNVFSCSVMHEALHNHYTQ | |
| | KSLSLSPGK | |
| TLC-S- | DIQMTQSPSSLSASVGDRVTITCRASQDVNTAVAWYQQKPGKAPKL | 62 |
| PLC-Knob | LIYSASFLYSGVPSRFSGSRSGTDFTLTISSLQPEDFATYYCQQHYTTP | |
| | PTFGCGTKVEIKRTVAAPDIQMTQSPSSLSASVGDRVTITCKASQDVSI | |
| | GVAWYQQKPGKAPKLLIYSASYRYTGVPSRFSGSGSGTDFTLTISSLQ | |
| | PEDFATYYCQQYYIYPYTFGCGTKVEIKRTVAAPSVFIFPPSDEQLKS | |
| | GTASVVCLLNNFYPREAKVQWKVDNALQSGNSQESVTEQDSKDSTY | |
| | SLSSTLTLSKADYEKHKVYACEVTHQGLSSPVTKSFNRGECGGGGSG | |
| | GGGSGGGGSEPKSSDKTHTCPPCPAPELLGGPSVFLFPPKPKDTLMIS | |
| | RTPEVTCVVVDVSHEDPEVKFNWYVDGVEVHNAKTKPREEQYNST | |
| | YRVVSVLTVLHQDWLNGKEYKCKVSNKALPAPIEKTISKAKGQPREP | |
| | QVYTLPPCREEMTKNQVSLWCLVKGFYPSDIAVEWESNGQPENNYK | |
| | TTPPVLDSDGSFFLYSKLTVDKSRWQQGNVFSCSVMHEALHNHYTQ | |
| | KSLSLSPGK | |
| TL-L- | DIQMTQSPSSLSASVGDRVTITCRASQDVNTAVAWYQQKPGKAPKL | 63 |
| PL-Knob | LIYSASFLYSGVPSRFSGSRSGTDFTLTISSLQPEDFATYYCQQHYTTP | |
| | PTFGQGTKVEIKRTVAAPSVFIFPPDIQMTQSPSSLSASVGDRVTITCK | |
| | ASQDVSIGVAWYQQKPGKAPKLLIYSASYRYTGVPSRFSGSGSGTDF | |
| | TLTISSLQPEDFATYYCQQYYIYPYTFGQGTKVEIKRTVAAPSVFIFPP | |
| | SDEQLKSGTASVVCLLNNFYPREAKVQWKVDNALQSGNSQESVTEQ | |
| | DSKDSTYSLSSTLTLSKADYEKHKVYACEVTHQGLSSPVTKSFNRGE | |
| | CGGGGSGGGGSGGGGSEPKSSDKTHTCPPCPAPELLGGPSVFLFPPKP | |
| | KDTLMISRTPEVTCVVVDVSHEDPEVKFNWYVDGVEVHNAKTKPRE | |
| | EQYNSTYRVVSVLTVLHQDWLNGKEYKCKVSNKALPAPIEKTISKA | |
| | KGQPREPQVYTLPPCREEMTKNQVSLWCLVKGFYPSDIAVEWESNG | |
| | QPENNYKTTPPVLDSDGSFFLYSKLTVDKSRWQQGNVFSCSVMHEA | |
| | LHNHYTQKSLSLSPGK | |
| TLC-L- | DIQMTQSPSSLSASVGDRVTITCRASQDVNTAVAWYQQKPGKAPKL | 64 |
| PL-Knob | LIYSASFLYSGVPSRFSGSRSGTDFTLTISSLQPEDFATYYCQQHYTTP | |
| | PTFGCGTKVEIKRTVAAPSVFIFPPDIQMTQSPSSLSASVGDRVTITCK | |
| | ASQDVSIGVAWYQQKPGKAPKLLIYSASYRYTGVPSRFSGSGSGTDF | |
| | TLTISSLQPEDFATYYCQQYYIYPYTFGQGTKVEIKRTVAAPSVFIFPP | |
| | SDEQLKSGTASVVCLLNNFYPREAKVQWKVDNALQSGNSQESVTEQ | |
| | DSKDSTYSLSSTLTLSKADYEKHKVYACEVTHQGLSSPVTKSFNRGE | |
| | CGGGGSGGGGSGGGGSEPKSSDKTHTCPPCPAPELLGGPSVFLFPPKP | |
| | KDTLMISRTPEVTCVVVDVSHEDPEVKFNWYVDGVEVHNAKTKPRE | |
| | EQYNSTYRVVSVLTVLHQDWLNGKEYKCKVSNKALPAPIEKTISKA | |
| | KGQPREPQVYTLPPCREEMTKNQVSLWCLVKGFYPSDIAVEWESNG | |
| | QPENNYKTTPPVLDSDGSFFLYSKLTVDKSRWQQGNVFSCSVMHEA | |
| | LHNHYTQKSLSLSPGK | |
| TL-L- | DIQMTQSPSSLSASVGDRVTITCRASQDVNTAVAWYQQKPGKAPKL | 65 |
| PLC-Knob | LIYSASFLYSGVPSRFSGSRSGTDFTLTISSLQPEDFATYYCQQHYTTP | |
| | PTFGCGTKVEIKRTVAAPSVFIFPPDIQMTQSPSSLSASVGDRVTITCK | |
| | ASQDVSIGVAWYQQKPGKAPKLLIYSASYRYTGVPSRFSGSGSGTDF | |
| | TLTISSLQPEDFATYYCQQYYIYPYTFGQGTKVEIKRTVAAPSVFIFPP | |
| | SDEQLKSGTASVVCLLNNFYPREAKVQWKVDNALQSGNSQESVTEQ | |
| | DSKDSTYSLSSTLTLSKADYEKHKVYACEVTHQGLSSPVTKSFNRGE | |
| | CGGGGSGGGGSGGGGSEPKSSDKTHTCPPCPAPELLGGPSVFLFPPKP | |
| | KDTLMISRTPEVTCVVVDVSHEDPEVKFNWYVDGVEVHNAKTKPRE | |
| | EQYNSTYRVVSVLTVLHQDWLNGKEYKCKVSNKALPAPIEKTISKA | |
| | KGQPREPQVYTLPPCREEMTKNQVSLWCLVKGFYPSDIAVEWESNG | |
| | QPENNYKTTPPVLDSDGSFFLYSKLTVDKSRWQQGNVFSCSVMHEA | |
| | LHNHYTQKSLSLSPGK | |
| TLC-L- | DIQMTQSPSSLSASVGDRVTITCRASQDVNTAVAWYQQKPGKAPKL | 66 |
| PLC-Knob | LIYSASFLYSGVPSRFSGSRSGTDFTLTISSLQPEDFATYYCQQHYTTP | |
| | PTFGCGTKVEIKRTVAAPSVFIFPPDIQMTQSPSSLSASVGDRVTITCK | |
| | ASQDVSIGVAWYQQKPGKAPKLLIYSASYRYTGVPSRFSGSGSGTDF | |
| | TLTISSLQPEDFATYYCQQYYIYPYTFGCGTKVEIKRTVAAPSVFIFPP | |
| | SDEQLKSGTASVVCLLNNFYPREAKVQWKVDNALQSGNSQESVTEQ | |
| | DSKDSTYSLSSTLTLSKADYEKHKVYACEVTHQGLSSPVTKSFNRGE | |
| | CGGGGSGGGGSGGGGSEPKSSDKTHTCPPCPAPELLGGPSVFLFPPKP | |
| | KDTLMISRTPEVTCVVVDVSHEDPEVKFNWYVDGVEVHNAKTKPRE | |
| | EQYNSTYRVVSVLTVLHQDWLNGKEYKCKVSNKALPAPIEKTISKA | |
| | KGQPREPQVYTLPPCREEMTKNQVSLWCLVKGFYPSDIAVEWESNG | |
| | QPENNYKTTPPVLDSDGSFFLYSKLTVDKSRWQQGNVFSCSVMHEA | |
| | LHNHYTQKSLSLSPGK | |

TABLE 33

| | | SEQ |
|---|---|---|
| Name | Sequence | ID NO |
| VH-S-Linker | GCTAGCACAAAAGGACCT | 484 |
| VH-L-Linker | GCTAGCACAAAAGGACCTAGTGTTTTCCCACTGGCTCCA | 485 |
| VL-S-Linker | CGTACGGTGGCTGCTCCA | 486 |
| VL-L-Linker | CGTACGGTGGCTGCTCCATCCGTTTTTATCTTTCCCCCA | 487 |
| TH-S-PH-Knob | GAAGTTCAACTTGTGGAGTCTGGAGGCGGTTTGGTACAACCTGGA | 488 |
| | GGTTCACTTCGTTTGTCATGTGCTGCCTCTGGGTTTAATATCAAGG | |
| | ATACTTATATTCATTGGGTTCGCCAGGCACCCGGAAAAGGGCTGG | |
| | AATGGGTGGCCCGTATATATCCCACTAACGGTTACACTCGATATG | |
| | CTGACTCTGTAAAGGGTCGATTTACTATATCCGCTGATACTAGCAA | |
| | AAACACTGCCTACCTCCAGATGAACAGTCTGCGCGCCGAGGATAC | |
| | AGCAGTTTATTATTGTTCCCGATGGGGAGGTGACGGGTTCTATGCC | |
| | ATGGACTACTGGGGTCAAGGGACACTGGTAACCGTTTCTTCTGCT | |
| | AGCACAAAAGGACCTGAAGTACAGTTGGTGGAGTCTGGTGGAGG | |
| | TCTTGTACAACCTGGCGGGAGTTTGCGGCTTTCCTGCGCTGCAAGC | |
| | GGGTTTACCTTCACCGATTATACCATGGATTGGGTACGCCAAGCC | |
| | CCTGGTAAGGGCCTTGAGTGGGTTGCCGATGTAAACCCTAATTCC | |
| | GGAGGAAGTATCTATAATCAACGCTTCAAGGGCCGATTCACTCTG | |
| | AGTGTGGATCGAAGCAAGAACACCTTGTACTTGCAGATGAATTCC | |
| | TTGCGGGCTGAAGACACAGCCGTCTATTACTGCGCCCGAAATTTG | |
| | GGGCCTTCATTCTATTTTGACTATTGGGGTCAGGGAACTCTGGTAA | |
| | CTGTTTCAAGTGCTAGCACCAAAGGACCTAGTGTTTTTCCTCTTGC | |
| | CCCTTCCTCAAAGTCTACCTCTGGGGGGACAGCCGCTCTGGGCTG | |
| | CCTGGTCAAGGATTATTTCCCAGAGCCTGTCACTGTCAGTTGGAAC | |
| | TCTGGAGCCTTGACTTCTGGTGTTCATACATTTCCTGCTGTCCTTC | |
| | AAAGCAGCGGCTTGTACTCATTGTCTTCTGTTGTGACAGTACCCTC | |
| | AAGCAGCCTCGGCACTCAGACATACATCTGCAATGTCAACCACAA | |
| | ACCCTCAAATACAAAGGTAGATAAAAAAGTCGAACCAAAGTCTT | |
| | GTGACAAAACTCACACGTGCCCACCGTGCCCAGCACCTGAACTCC | |
| | TGGGGGGACCGTCAGTCTTCCTCTTCCCCCCAAAACCCAAGGACA | |
| | CCCTCATGATCTCCCGGACCCCTGAGGTCACATGCGTGGTGGTGG | |
| | ACGTGAGCCACGAAGACCCTGAGGTCAAGTTCAACTGGTACGTGG | |
| | ACGGCGTGGAGGTGCATAATGCCAAGACAAAGCCGCGGGAGGAG | |
| | CAGTACAACAGCACGTACCGTGTGGTCAGCGTCCTCACCGTCCTG | |
| | CACCAGGACTGGCTGAATGGCAAGGAGTACAAGTGCAAGGTCTC | |
| | CAACAAAGCCCTCCCAGCCCCCATCGAGAAAACCATCTCCAAAGC | |
| | CAAAGGGCAGCCCCGAGAACCACAGGTGTACACCCTGCCCCCATG | |
| | CCGGGAGGAGATGACCAAGAACCAGGTCAGCCTGTGGTGCCTGG | |
| | TCAAAGGCTTCTATCCCAGCGACATCGCCGTGGAGTGGGAGAGCA | |
| | ATGGGCAGCCGGAGAACAACTACAAGACCACGCCTCCCGTGCTG | |
| | GACTCCGACGGCTCCTTCTTCCTCTACAGCAAGCTCACCGTGGAC | |
| | AAGAGCAGGTGGCAGCAGGGGAACGTCTTCTCATGCTCCGTGATG | |
| | CATGAGGCTCTGCACAACCACTACACGCAGAAGAGCCTCTCCCTG | |
| | TCTCCGGGTAAA | |
| THC-S-PH-Knob | GAAGTTCAACTTGTGGAGTCTGGAGGCGGTTTGGTACAACCTGGA | 489 |
| | GGTTCACTTCGTTTGTCATGTGCTGCCTCTGGGTTTAATATCAAGG | |
| | ATACTTATATTCATTGGGTTCGCCAGGCACCCGGAAAATGCCTGG | |
| | AATGGGTGGCCCGTATATATCCCACTAACGGTTACACTCGATATG | |
| | CTGACTCTGTAAAGGGTCGATTTACTATATCCGCTGATACTAGCAA | |
| | AAACACTGCCTACCTCCAGATGAACAGTCTGCGCGCCGAGGATAC | |
| | AGCAGTTTATTATTGTTCCCGATGGGGAGGTGACGGGTTCTATGCC | |
| | ATGGACTACTGGGGTCAAGGGACACTGGTAACCGTTTCTTCTGCT | |
| | AGCACAAAAGGACCTGAAGTACAGTTGGTGGAGTCTGGTGGAGG | |
| | TCTTGTACAACCTGGCGGGAGTTTGCGGCTTTCCTGCGCTGCAAGC | |
| | GGGTTTACCTTCACCGATTATACCATGGATTGGGTACGCCAAGCC | |
| | CCTGGTAAGGGCCTTGAGTGGGTTGCCGATGTAAACCCTAATTCC | |
| | GGAGGAAGTATCTATAATCAACGCTTCAAGGGCCGATTCACTCTG | |
| | AGTGTGGATCGAAGCAAGAACACCTTGTACTTGCAGATGAATTCC | |
| | TTGCGGGCTGAAGACACAGCCGTCTATTACTGCGCCCGAAATTTG | |
| | GGGCCTTCATTCTATTTTGACTATTGGGGTCAGGGAACTCTGGTAA | |
| | CTGTTTCAAGTGCTAGCACCAAAGGACCTAGTGTTTTTCCTCTTGC | |
| | CCCTTCCTCAAAGTCTACCTCTGGGGGGACAGCCGCTCTGGGCTG | |
| | CCTGGTCAAGGATTATTTCCCAGAGCCTGTCACTGTCAGTTGGAAC | |
| | TCTGGAGCCTTGACTTCTGGTGTTCATACATTTCCTGCTGTCCTTC | |
| | AAAGCAGCGGCTTGTACTCATTGTCTTCTGTTGTGACAGTACCCTC | |
| | AAGCAGCCTCGGCACTCAGACATACATCTGCAATGTCAACCACAA | |
| | ACCCTCAAATACAAAGGTAGATAAAAAAGTCGAACCAAAGTCTT | |
| | GTGACAAAACTCACACGTGCCCACCGTGCCCAGCACCTGAACTCC | |
| | TGGGGGGACCGTCAGTCTTCCTCTTCCCCCCAAAACCCAAGGACA | |
| | CCCTCATGATCTCCCGGACCCCTGAGGTCACATGCGTGGTGGTGG | |
| | ACGTGAGCCACGAAGACCCTGAGGTCAAGTTCAACTGGTACGTGG | |
| | ACGGCGTGGAGGTGCATAATGCCAAGACAAAGCCGCGGGAGGAG | |
| | CAGTACAACAGCACGTACCGTGTGGTCAGCGTCCTCACCGTCCTG | |
| | CACCAGGACTGGCTGAATGGCAAGGAGTACAAGTGCAAGGTCTC | |
| | CAACAAAGCCCTCCCAGCCCCCATCGAGAAAACCATCTCCAAAGC | |
| | CAAAGGGCAGCCCCGAGAACCACAGGTGTACACCCTGCCCCCATG | |
| | CCGGGAGGAGATGACCAAGAACCAGGTCAGCCTGTGGTGCCTGG | |
| | TCAAAGGCTTCTATCCCAGCGACATCGCCGTGGAGTGGGAGAGCA | |
| | ATGGGCAGCCGGAGAACAACTACAAGACCACGCCTCCCGTGCTG | |
| | GACTCCGACGGCTCCTTCTTCCTCTACAGCAAGCTCACCGTGGAC | |
| | AAGAGCAGGTGGCAGCAGGGGAACGTCTTCTCATGCTCCGTGATG | |
| | CATGAGGCTCTGCACAACCACTACACGCAGAAGAGCCTCTCCCTG | |
| | TCTCCGGGTAAA | |
| TH-S-PHC-Knob | GAAGTTCAACTTGTGGAGTCTGGAGGCGGTTTGGTACAACCTGGA | 490 |
| | GGTTCACTTCGTTTGTCATGTGCTGCCTCTGGGTTTAATATCAAGG | |
| | ATACTTATATTCATTGGGTTCGCCAGGCACCCGGAAAAGGGCTGG | |
| | AATGGGTGGCCCGTATATATCCCACTAACGGTTACACTCGATATG | |
| | CTGACTCTGTAAAGGGTCGATTTACTATATCCGCTGATACTAGCAA | |
| | AAACACTGCCTACCTCCAGATGAACAGTCTGCGCGCCGAGGATAC | |
| | AGCAGTTTATTATTGTTCCCGATGGGGAGGTGACGGGTTCTATGCC | |
| | ATGGACTACTGGGGTCAAGGGACACTGGTAACCGTTTCTTCTGCT | |
| | AGCACAAAAGGACCTGAAGTACAGTTGGTGGAGTCTGGTGGAGG | |
| | TCTTGTACAACCTGGCGGGAGTTTGCGGCTTTCCTGCGCTGCAAGC | |
| | GGGTTTACCTTCACCGATTATACCATGGATTGGGTACGCCAAGCC | |
| | CCTGGTAAGTGCCTTGAGTGGGTTGCCGATGTAAACCCTAATTCC | |
| | GGAGGAAGTATCTATAATCAACGCTTCAAGGGCCGATTCACTCTG | |
| | AGTGTGGATCGAAGCAAGAACACCTTGTACTTGCAGATGAATTCC | |
| | TTGCGGGCTGAAGACACAGCCGTCTATTACTGCGCCCGAAATTTG | |
| | GGGCCTTCATTCTATTTTGACTATTGGGGTCAGGGAACTCTGGTAA | |
| | CTGTTTCAAGTGCTAGCACCAAAGGACCTAGTGTTTTTCCTCTTGC | |
| | CCCTTCCTCAAAGTCTACCTCTGGGGGGACAGCCGCTCTGGGCTG | |
| | CCTGGTCAAGGATTATTTCCCAGAGCCTGTCACTGTCAGTTGGAAC | |
| | TCTGGAGCCTTGACTTCTGGTGTTCATACATTTCCTGCTGTCCTTC | |
| | AAAGCAGCGGCTTGTACTCATTGTCTTCTGTTGTGACAGTACCCTC | |
| | AAGCAGCCTCGGCACTCAGACATACATCTGCAATGTCAACCACAA | |
| | ACCCTCAAATACAAAGGTAGATAAAAAAGTCGAACCAAAGTCTT | |
| | GTGACAAAACTCACACGTGCCCACCGTGCCCAGCACCTGAACTCC | |
| | TGGGGGGACCGTCAGTCTTCCTCTTCCCCCCAAAACCCAAGGACA | |
| | CCCTCATGATCTCCCGGACCCCTGAGGTCACATGCGTGGTGGTGG | |
| | ACGTGAGCCACGAAGACCCTGAGGTCAAGTTCAACTGGTACGTGG | |
| | ACGGCGTGGAGGTGCATAATGCCAAGACAAAGCCGCGGGAGGAG | |
| | CAGTACAACAGCACGTACCGTGTGGTCAGCGTCCTCACCGTCCTG | |
| | CACCAGGACTGGCTGAATGGCAAGGAGTACAAGTGCAAGGTCTC | |
| | CAACAAAGCCCTCCCAGCCCCCATCGAGAAAACCATCTCCAAAGC | |
| | CAAAGGGCAGCCCCGAGAACCACAGGTGTACACCCTGCCCCCATG | |
| | CCGGGAGGAGATGACCAAGAACCAGGTCAGCCTGTGGTGCCTGG | |
| | TCAAAGGCTTCTATCCCAGCGACATCGCCGTGGAGTGGGAGAGCA | |
| | ATGGGCAGCCGGAGAACAACTACAAGACCACGCCTCCCGTGCTG | |
| | GACTCCGACGGCTCCTTCTTCCTCTACAGCAAGCTCACCGTGGAC | |
| | AAGAGCAGGTGGCAGCAGGGGAACGTCTTCTCATGCTCCGTGATG | |
| | CATGAGGCTCTGCACAACCACTACACGCAGAAGAGCCTCTCCCTG | |
| | TCTCCGGGTAAA | |
| THC-S-PHC-Knob | GAAGTTCAACTTGTGGAGTCTGGAGGCGGTTTGGTACAACCTGGA | 491 |
| | GGTTCACTTCGTTTGTCATGTGCTGCCTCTGGGTTTAATATCAAGG | |
| | ATACTTATATTCATTGGGTTCGCCAGGCACCCGGAAAATGCCTGG | |
| | AATGGGTGGCCCGTATATATCCCACTAACGGTTACACTCGATATG | |
| | CTGACTCTGTAAAGGGTCGATTTACTATATCCGCTGATACTAGCAA | |
| | AAACACTGCCTACCTCCAGATGAACAGTCTGCGCGCCGAGGATAC | |
| | AGCAGTTTATTATTGTTCCCGATGGGGAGGTGACGGGTTCTATGCC | |
| | ATGGACTACTGGGGTCAAGGGACACTGGTAACCGTTTCTTCTGCT | |
| | AGCACAAAAGGACCTAGTGTTTTCCCACTGGCTCCAGAAGTACAG | |
| | TTGGTGGAGTCTGGTGGAGGTCTTGTACAACCTGGCGGGAGTTTG | |
| | CGGCTTTCCTGCGCTGCAAGCGGGTTTACCTTCACCGATTATACCA | |
| | TGGATTGGGTACGCCAAGCCCCTGGTAAGTGCCTTGAGTGGGTTG | |
| | CCGATGTAAACCCTAATTCCGGAGGAAGTATCTATAATCAACGCT | |
| | TCAAGGGCCGATTCACTCTGAGTGTGGATCGAAGCAAGAACACCT | |
| | TGTACTTGCAGATGAATTCCTTGCGGGCTGAAGACACAGCCGTCT | |
| | ATTACTGCGCCCGAAATTTGGGGCCTTCATTCTATTTTGACTATTG | |
| | GGGTCAGGGAACTCTGGTAACTGTTTCAAGTGCTAGCACCAAAGG | |
| | ACCTAGTGTTTTTCCTCTTGCCCCTTCCTCAAAGTCTACCTCTGGG | |
| | GGGACAGCCGCTCTGGGCTGCCTGGTCAAGGATTATTTCCCAGAG | |
| | CCTGTCACTGTCAGTTGGAACTCTGGAGCCTTGACTTCTGGTGTTC | |
| | ATACATTTCCTGCTGTCCTTCAAAGCAGCGGCTTGTACTCATTGTC | |
| | TTCTGTTGTGACAGTACCCTCAAGCAGCCTCGGCACTCAGACATA | |
| | CATCTGCAATGTCAACCACAAACCCTCAAATACAAAGGTAGATAA | |
| | AAAAGTCGAACCAAAGTCTTGTGACAAAACTCACACGTGCCCACC | |
| | GTGCCCAGCACCTGAACTCCTGGGGGGACCGTCAGTCTTCCTCTTC | |
| | CCCCCAAAACCCAAGGACACCCTCATGATCTCCCGGACCCCTGAG | |
| | GTCACATGCGTGGTGGTGGACGTGAGCCACGAAGACCCTGAGGTC | |
| | AAGTTCAACTGGTACGTGGACGGCGTGGAGGTGCATAATGCCAAG | |
| | ACAAAGCCGCGGGAGGAGCAGTACAACAGCACGTACCGTGTGGT | |
| | CAGCGTCCTCACCGTCCTGCACCAGGACTGGCTGAATGGCAAGGA | |
| | GTACAAGTGCAAGGTCTCCAACAAAGCCCTCCCAGCCCCCATCGA | |
| | GAAAACCATCTCCAAAGCCAAAGGGCAGCCCCGAGAACCACAGG | |
| | TGTACACCCTGCCCCCATGCCGGGAGGAGATGACCAAGAACCAG | |
| | GTCAGCCTGTGGTGCCTGGTCAAAGGCTTCTATCCCAGCGACATC | |
| | GCCGTGGAGTGGGAGAGCAATGGGCAGCCGGAGAACAACTACAA | |
| | GACCACGCCTCCCGTGCTGGACTCCGACGGCTCCTTCTTCCTCTAC | |
| | AGCAAGCTCACCGTGGACAAGAGCAGGTGGCAGCAGGGGAACGT | |
| | CTTCTCATGCTCCGTGATGCATGAGGCTCTGCACAACCACTACAC | |
| | GCAGAAGAGCCTCTCCCTGTCTCCGGGTAAA | |
| TH-L-PH-Knob | GAAGTTCAACTTGTGGAGTCTGGAGGCGGTTTGGTACAACCTGGA | 492 |
| | GGTTCACTTCGTTTGTCATGTGCTGCCTCTGGGTTTAATATCAAGG | |
| | ATACTTATATTCATTGGGTTCGCCAGGCACCCGGAAAAGGGCTGG | |
| | AATGGGTGGCCCGTATATATCCCACTAACGGTTACACTCGATATG | |
| | CTGACTCTGTAAAGGGTCGATTTACTATATCCGCTGATACTAGCAA | |
| | AAACACTGCCTACCTCCAGATGAACAGTCTGCGCGCCGAGGATAC | |
| | AGCAGTTTATTATTGTTCCCGATGGGGAGGTGACGGGTTCTATGCC | |
| | ATGGACTACTGGGGTCAAGGGACACTGGTAACCGTTTCTTCTGCT | |
| | AGCACAAAAGGACCTAGTGTTTTCCCACTGGCTCCAGAAGTACAG | |
| | TTGGTGGAGTCTGGTGGAGGTCTTGTACAACCTGGCGGGAGTTTG | |
| | CGGCTTTCCTGCGCTGCAAGCGGGTTTACCTTCACCGATTATACCA | |
| | TGGATTGGGTACGCCAAGCCCCTGGTAAGGGCCTTGAGTGGGTTG | |
| | CCGATGTAAACCCTAATTCCGGAGGAAGTATCTATAATCAACGCT | |
| | TCAAGGGCCGATTCACTCTGAGTGTGGATCGAAGCAAGAACACCT | |
| | TGTACTTGCAGATGAATTCCTTGCGGGCTGAAGACACAGCCGTCT | |
| | ATTACTGCGCCCGAAATTTGGGGCCTTCATTCTATTTTGACTATTG | |
| | GGGTCAGGGAACTCTGGTAACTGTTTCAAGTGCTAGCACCAAAGG | |
| | ACCTAGTGTTTTTCCTCTTGCCCCTTCCTCAAAGTCTACCTCTGGG | |
| | GGGACAGCCGCTCTGGGCTGCCTGGTCAAGGATTATTTCCCAGAG | |
| | CCTGTCACTGTCAGTTGGAACTCTGGAGCCTTGACTTCTGGTGTTC | |
| | ATACATTTCCTGCTGTCCTTCAAAGCAGCGGCTTGTACTCATTGTC | |
| | TTCTGTTGTGACAGTACCCTCAAGCAGCCTCGGCACTCAGACATA | |
| | CATCTGCAATGTCAACCACAAACCCTCAAATACAAAGGTAGATAA | |
| | AAAAGTCGAACCAAAGTCTTGTGACAAAACTCACACGTGCCCACC | |
| | GTGCCCAGCACCTGAACTCCTGGGGGGACCGTCAGTCTTCCTCTTC | |
| | CCCCCAAAACCCAAGGACACCCTCATGATCTCCCGGACCCCTGAG | |
| | GTCACATGCGTGGTGGTGGACGTGAGCCACGAAGACCCTGAGGTC | |
| | AAGTTCAACTGGTACGTGGACGGCGTGGAGGTGCATAATGCCAAG | |
| | ACAAAGCCGCGGGAGGAGCAGTACAACAGCACGTACCGTGTGGT | |
| | CAGCGTCCTCACCGTCCTGCACCAGGACTGGCTGAATGGCAAGGA | |
| | GTACAAGTGCAAGGTCTCCAACAAAGCCCTCCCAGCCCCCATCGA | |
| | GAAAACCATCTCCAAAGCCAAAGGGCAGCCCCGAGAACCACAGG | |
| | TGTACACCCTGCCCCCATGCCGGGAGGAGATGACCAAGAACCAG | |
| | GTCAGCCTGTGGTGCCTGGTCAAAGGCTTCTATCCCAGCGACATC | |
| | GCCGTGGAGTGGGAGAGCAATGGGCAGCCGGAGAACAACTACAA | |
| | GACCACGCCTCCCGTGCTGGACTCCGACGGCTCCTTCTTCCTCTAC | |
| | AGCAAGCTCACCGTGGACAAGAGCAGGTGGCAGCAGGGGAACGT | |
| | CTTCTCATGCTCCGTGATGCATGAGGCTCTGCACAACCACTACAC | |
| | GCAGAAGAGCCTCTCCCTGTCTCCGGGTAAA | |
| THC-L-PH-Knob | GAAGTTCAACTTGTGGAGTCTGGAGGCGGTTTGGTACAACCTGGA | 493 |
| | GGTTCACTTCGTTTGTCATGTGCTGCCTCTGGGTTTAATATCAAGG | |
| | ATACTTATATTCATTGGGTTCGCCAGGCACCCGGAAAATGCCTGG | |
| | AATGGGTGGCCCGTATATATCCCACTAACGGTTACACTCGATATG | |
| | CTGACTCTGTAAAGGGTCGATTTACTATATCCGCTGATACTAGCAA | |
| | AAACACTGCCTACCTCCAGATGAACAGTCTGCGCGCCGAGGATAC | |
| | AGCAGTTTATTATTGTTCCCGATGGGGAGGTGACGGGTTCTATGCC | |
| | ATGGACTACTGGGGTCAAGGGACACTGGTAACCGTTTCTTCTGCT | |
| | AGCACAAAAGGACCTAGTGTTTTCCCACTGGCTCCAGAAGTACAG | |
| | TTGGTGGAGTCTGGTGGAGGTCTTGTACAACCTGGCGGGAGTTTG | |
| | CGGCTTTCCTGCGCTGCAAGCGGGTTTACCTTCACCGATTATACCA | |
| | TGGATTGGGTACGCCAAGCCCCTGGTAAGGGCCTTGAGTGGGTTG | |
| | CCGATGTAAACCCTAATTCCGGAGGAAGTATCTATAATCAACGCT | |
| | TCAAGGGCCGATTCACTCTGAGTGTGGATCGAAGCAAGAACACCT | |
| | TGTACTTGCAGATGAATTCCTTGCGGGCTGAAGACACAGCCGTCT | |
| | ATTACTGCGCCCGAAATTTGGGGCCTTCATTCTATTTTGACTATTG | |
| | GGGTCAGGGAACTCTGGTAACTGTTTCAAGTGCTAGCACCAAAGG | |
| | ACCTAGTGTTTTTCCTCTTGCCCCTTCCTCAAAGTCTACCTCTGGG | |
| | GGGACAGCCGCTCTGGGCTGCCTGGTCAAGGATTATTTCCCAGAG | |
| | CCTGTCACTGTCAGTTGGAACTCTGGAGCCTTGACTTCTGGTGTTC | |
| | ATACATTTCCTGCTGTCCTTCAAAGCAGCGGCTTGTACTCATTGTC | |
| | TTCTGTTGTGACAGTACCCTCAAGCAGCCTCGGCACTCAGACATA | |
| | CATCTGCAATGTCAACCACAAACCCTCAAATACAAAGGTAGATAA | |
| | AAAAGTCGAACCAAAGTCTTGTGACAAAACTCACACGTGCCCACC | |
| | GTGCCCAGCACCTGAACTCCTGGGGGGACCGTCAGTCTTCCTCTTC | |
| | CCCCCAAAACCCAAGGACACCCTCATGATCTCCCGGACCCCTGAG | |
| | GTCACATGCGTGGTGGTGGACGTGAGCCACGAAGACCCTGAGGTC | |
| | AAGTTCAACTGGTACGTGGACGGCGTGGAGGTGCATAATGCCAAG | |
| | ACAAAGCCGCGGGAGGAGCAGTACAACAGCACGTACCGTGTGGT | |
| | CAGCGTCCTCACCGTCCTGCACCAGGACTGGCTGAATGGCAAGGA | |
| | GTACAAGTGCAAGGTCTCCAACAAAGCCCTCCCAGCCCCCATCGA | |
| | GAAAACCATCTCCAAAGCCAAAGGGCAGCCCCGAGAACCACAGG | |
| | TGTACACCCTGCCCCCATGCCGGGAGGAGATGACCAAGAACCAG | |
| | GTCAGCCTGTGGTGCCTGGTCAAAGGCTTCTATCCCAGCGACATC | |
| | GCCGTGGAGTGGGAGAGCAATGGGCAGCCGGAGAACAACTACAA | |
| | GACCACGCCTCCCGTGCTGGACTCCGACGGCTCCTTCTTCCTCTAC | |
| | AGCAAGCTCACCGTGGACAAGAGCAGGTGGCAGCAGGGGAACGT | |
| | CTTCTCATGCTCCGTGATGCATGAGGCTCTGCACAACCACTACAC | |
| | GCAGAAGAGCCTCTCCCTGTCTCCGGGTAAA | |
| TH-L-PHC-Knob | GAAGTTCAACTTGTGGAGTCTGGAGGCGGTTTGGTACAACCTGGA | 494 |
| | GGTTCACTTCGTTTGTCATGTGCTGCCTCTGGGTTTAATATCAAGG | |
| | ATACTTATATTCATTGGGTTCGCCAGGCACCCGGAAAAGGGCTGG | |
| | AATGGGTGGCCCGTATATATCCCACTAACGGTTACACTCGATATG | |
| | CTGACTCTGTAAAGGGTCGATTTACTATATCCGCTGATACTAGCAA | |
| | AAACACTGCCTACCTCCAGATGAACAGTCTGCGCGCCGAGGATAC | |
| | AGCAGTTTATTATTGTTCCCGATGGGGAGGTGACGGGTTCTATGCC | |
| | ATGGACTACTGGGGTCAAGGGACACTGGTAACCGTTTCTTCTGCT | |
| | AGCACAAAAGGACCTAGTGTTTTCCCACTGGCTCCAGAAGTACAG | |
| | TTGGTGGAGTCTGGTGGAGGTCTTGTACAACCTGGCGGGAGTTTG | |
| | CGGCTTTCCTGCGCTGCAAGCGGGTTTACCTTCACCGATTATACCA | |
| | TGGATTGGGTACGCCAAGCCCCTGGTAAGTGCCTTGAGTGGGTTG | |
| | CCGATGTAAACCCTAATTCCGGAGGAAGTATCTATAATCAACGCT | |
| | TCAAGGGCCGATTCACTCTGAGTGTGGATCGAAGCAAGAACACCT | |
| | TGTACTTGCAGATGAATTCCTTGCGGGCTGAAGACACAGCCGTCT | |
| | ATTACTGCGCCCGAAATTTGGGGCCTTCATTCTATTTTGACTATTG | |
| | GGGTCAGGGAACTCTGGTAACTGTTTCAAGTGCTAGCACCAAAGG | |
| | ACCTAGTGTTTTTCCTCTTGCCCCTTCCTCAAAGTCTACCTCTGGG | |
| | GGGACAGCCGCTCTGGGCTGCCTGGTCAAGGATTATTTCCCAGAG | |
| | CCTGTCACTGTCAGTTGGAACTCTGGAGCCTTGACTTCTGGTGTTC | |
| | ATACATTTCCTGCTGTCCTTCAAAGCAGCGGCTTGTACTCATTGTC | |
| | TTCTGTTGTGACAGTACCCTCAAGCAGCCTCGGCACTCAGACATA | |
| | CATCTGCAATGTCAACCACAAACCCTCAAATACAAAGGTAGATAA | |
| | AAAAGTCGAACCAAAGTCTTGTGACAAAACTCACACGTGCCCACC | |
| | GTGCCCAGCACCTGAACTCCTGGGGGGACCGTCAGTCTTCCTCTTC | |
| | CCCCCAAAACCCAAGGACACCCTCATGATCTCCCGGACCCCTGAG | |
| | GTCACATGCGTGGTGGTGGACGTGAGCCACGAAGACCCTGAGGTC | |
| | AAGTTCAACTGGTACGTGGACGGCGTGGAGGTGCATAATGCCAAG | |
| | ACAAAGCCGCGGGAGGAGCAGTACAACAGCACGTACCGTGTGGT | |
| | CAGCGTCCTCACCGTCCTGCACCAGGACTGGCTGAATGGCAAGGA | |
| | GTACAAGTGCAAGGTCTCCAACAAAGCCCTCCCAGCCCCCATCGA | |
| | GAAAACCATCTCCAAAGCCAAAGGGCAGCCCCGAGAACCACAGG | |
| | TGTACACCCTGCCCCCATGCCGGGAGGAGATGACCAAGAACCAG | |
| | GTCAGCCTGTGGTGCCTGGTCAAAGGCTTCTATCCCAGCGACATC | |
| | GCCGTGGAGTGGGAGAGCAATGGGCAGCCGGAGAACAACTACAA | |
| | GACCACGCCTCCCGTGCTGGACTCCGACGGCTCCTTCTTCCTCTAC | |
| | AGCAAGCTCACCGTGGACAAGAGCAGGTGGCAGCAGGGGAACGT | |
| | CTTCTCATGCTCCGTGATGCATGAGGCTCTGCACAACCACTACAC | |
| | GCAGAAGAGCCTCTCCCTGTCTCCGGGTAAA | |
| THC-L-PHC-Knob | GAAGTTCAACTTGTGGAGTCTGGAGGCGGTTTGGTACAACCTGGA | 495 |
| | GGTTCACTTCGTTTGTCATGTGCTGCCTCTGGGTTTAATATCAAGG | |
| | ATACTTATATTCATTGGGTTCGCCAGGCACCCGGAAAATGCCTGG | |
| | AATGGGTGGCCCGTATATATCCCACTAACGGTTACACTCGATATG | |
| | CTGACTCTGTAAAGGGTCGATTTACTATATCCGCTGATACTAGCAA | |
| | AAACACTGCCTACCTCCAGATGAACAGTCTGCGCGCCGAGGATAC | |
| | AGCAGTTTATTATTGTTCCCGATGGGGAGGTGACGGGTTCTATGCC | |
| | ATGGACTACTGGGGTCAAGGGACACTGGTAACCGTTTCTTCTGCT | |
| | AGCACAAAAGGACCTAGTGTTTTCCCACTGGCTCCAGAAGTACAG | |
| | TTGGTGGAGTCTGGTGGAGGTCTTGTACAACCTGGCGGGAGTTTG | |
| | CGGCTTTCCTGCGCTGCAAGCGGGTTTACCTTCACCGATTATACCA | |
| | TGGATTGGGTACGCCAAGCCCCTGGTAAGTGCCTTGAGTGGGTTG | |
| | CCGATGTAAACCCTAATTCCGGAGGAAGTATCTATAATCAACGCT | |
| | TCAAGGGCCGATTCACTCTGAGTGTGGATCGAAGCAAGAACACCT | |
| | TGTACTTGCAGATGAATTCCTTGCGGGCTGAAGACACAGCCGTCT | |
| | ATTACTGCGCCCGAAATTTGGGGCCTTCATTCTATTTTGACTATTG | |
| | GGGTCAGGGAACTCTGGTAACTGTTTCAAGTGCTAGCACCAAAGG | |
| | ACCTAGTGTTTTTCCTCTTGCCCCTTCCTCAAAGTCTACCTCTGGG | |
| | GGGACAGCCGCTCTGGGCTGCCTGGTCAAGGATTATTTCCCAGAG | |
| | CCTGTCACTGTCAGTTGGAACTCTGGAGCCTTGACTTCTGGTGTTC | |
| | ATACATTTCCTGCTGTCCTTCAAAGCAGCGGCTTGTACTCATTGTC | |
| | TTCTGTTGTGACAGTACCCTCAAGCAGCCTCGGCACTCAGACATA | |
| | CATCTGCAATGTCAACCACAAACCCTCAAATACAAAGGTAGATAA | |
| | AAAAGTCGAACCAAAGTCTTGTGACAAAACTCACACGTGCCCACC | |
| | GTGCCCAGCACCTGAACTCCTGGGGGGACCGTCAGTCTTCCTCTTC | |
| | CCCCCAAAACCCAAGGACACCCTCATGATCTCCCGGACCCCTGAG | |
| | GTCACATGCGTGGTGGTGGACGTGAGCCACGAAGACCCTGAGGTC | |
| | AAGTTCAACTGGTACGTGGACGGCGTGGAGGTGCATAATGCCAAG | |
| | ACAAAGCCGCGGGAGGAGCAGTACAACAGCACGTACCGTGTGGT | |
| | CAGCGTCCTCACCGTCCTGCACCAGGACTGGCTGAATGGCAAGGA | |
| | GTACAAGTGCAAGGTCTCCAACAAAGCCCTCCCAGCCCCCATCGA | |
| | GAAAACCATCTCCAAAGCCAAAGGGCAGCCCCGAGAACCACAGG | |
| | TGTACACCCTGCCCCCATGCCGGGAGGAGATGACCAAGAACCAG | |
| | GTCAGCCTGTGGTGCCTGGTCAAAGGCTTCTATCCCAGCGACATC | |
| | GCCGTGGAGTGGGAGAGCAATGGGCAGCCGGAGAACAACTACAA | |
| | GACCACGCCTCCCGTGCTGGACTCCGACGGCTCCTTCTTCCTCTAC | |
| | AGCAAGCTCACCGTGGACAAGAGCAGGTGGCAGCAGGGGAACGT | |
| | CTTCTCATGCTCCGTGATGCATGAGGCTCTGCACAACCACTACAC | |
| | GCAGAAGAGCCTCTCCCTGTCTCCGGGTAAA | |
| TL-S-PL-Knob | GACATTCAGATGACCCAATCCCCCTCTAGCCTTTCAGCCTCCGTAG | 496 |
| | GGGACAGAGTTACAATAACCTGTAGGGCTAGTCAGGACGTTAATA | |
| | CAGCAGTCGCATGGTACCAGCAGAAGCCCGGTAAGGCTCCTAAGCT | |
| | TTTGATCTACAGTGCTTCTTTCCTGTATTCTGGTGTACCTAGCCGA | |
| | TTCTCAGGCTCTCGGAGTGGCACAGACTTCACTCTGACAATTTCAA | |
| | GTCTCCAGCCAGAAGATTTTGCAACCTACTACTGCCAACAACACT | |
| | ACACTACTCCTCCAACCTTCGGACAGGGCACAAAAGTAGAGATTA | |
| | AGCGTACGGTGGCTGCTCCAGATATTCAAATGACCCAAAGTCCAA | |
| | GTTCCCTTTCAGCATCTGTCGGTGATCGAGTCACTATAACTTGTAA | |
| | GGCCAGCCAAGACGTTAGCATAGGAGTAGCATGGTACCAACAAA | |
| | AGCCTGGGAAGGCTCCCAAACTTCTCATTTATTCTGCTTCCTACCG | |
| | ATATACTGGTGTCCCAAGTAGATTTTCTGGCAGCGGATCTGGAAC | |
| | TGATTTTACATTGACTATCAGCTCCCTCCAGCCTGAGGACTTCGCT | |
| | ACTTATTACTGCCAACAGTACTACATTTATCCCTATACATTCGGTC | |
| | AAGGGACCAAAGTAGAGATCAAACGTACGGTGGCAGCTCCCAGC | |
| | GTTTTTATCTTTCCCCCATCCGACGAGCAGCTCAAGAGTGGCACTG | |
| | CCTCTGTAGTTTGTTTGCTGAATAACTTCTATCCACGTGAAGCAAA | |
| | AGTACAGTGGAAGGTCGATAATGCCCTTCAGAGCGGTAACAGCCA | |
| | AGAAAGTGTTACCGAGCAAGATTCCAAAGATTCCACTTACAGTCT | |
| | GTCCAGCACATTGACACTGAGTAAGGCTGATTACGAAAAACACAA | |
| | GGTGTACGCATGCGAGGTGACACACCAAGGTCTTTCATCTCCTGT | |
| | AACTAAGAGCTTTAACCGGGGAGAATGTGGTGGTGGGGGCAGCG | |
| | GGGGCGGAGGTAGTGGAGGCGGCGGTAGTGAACCAAAGAGTAGT | |
| | GACAAAACTCACACGTGCCCACCGTGCCCAGCACCTGAACTCCTG | |
| | GGGGGACCGTCAGTCTTCCTCTTCCCCCCAAAACCCAAGGACACC | |
| | CTCATGATCTCCCGGACCCCTGAGGTCACATGCGTGGTGGTGGAC | |
| | GTGAGCCACGAAGACCCTGAGGTCAAGTTCAACTGGTACGTGGAC | |
| | GGCGTGGAGGTGCATAATGCCAAGACAAAGCCGCGGGAGGAGCA | |
| | GTACAACAGCACGTACCGTGTGGTCAGCGTCCTCACCGTCCTGCA | |
| | CCAGGACTGGCTGAATGGCAAGGAGTACAAGTGCAAGGTCTCCA | |
| | ACAAAGCCCTCCCAGCCCCCATCGAGAAAACCATCTCCAAAGCCA | |
| | AAGGGCAGCCCCGAGAACCACAGGTGTACACCCTGCCCCCATGCC | |
| | GGGAGGAGATGACCAAGAACCAGGTCAGCCTGTGGTGCCTGGTC | |
| | AAAGGCTTCTATCCCAGCGACATCGCCGTGGAGTGGGAGAGCAAT | |
| | GGGCAGCCGGAGAACAACTACAAGACCACGCCTCCCGTGCTGGA | |
| | CTCCGACGGCTCCTTCTTCCTCTACAGCAAGCTCACCGTGGACAA | |
| | GAGCAGGTGGCAGCAGGGGAACGTCTTCTCATGCTCCGTGATGCA | |
| | TGAGGCTCTGCACAACCACTACACGCAGAAGAGCCTCTCCCTGTC | |
| | TCCGGGTAAA | |
| TLC-S-PL-Knob | GACATTCAGATGACCCAATCCCCCTCTAGCCTTTCAGCCTCCGTAG | 497 |
| | GGGACAGAGTTACAATAACCTGTAGGGCTAGTCAGGACGTTAATA | |
| | CAGCAGTCGCATGGTACCAGCAGAAGCCCGGTAAGGCTCCTAAGCT | |
| | TTTGATCTACAGTGCTTCTTTCCTGTATTCTGGTGTACCTAGCCGA | |
| | TTCTCAGGCTCTCGGAGTGGCACAGACTTCACTCTGACAATTTCAA | |
| | GTCTCCAGCCAGAAGATTTTGCAACCTACTACTGCCAACAACACT | |
| | ACACTACTCCTCCAACCTTCGGATGTGGCACAAAAGTAGAGATTA | |
| | AGCGTACGGTGGCTGCTCCAGATATTCAAATGACCCAAAGTCCAA | |
| | GTTCCCTTTCAGCATCTGTCGGTGATCGAGTCACTATAACTTGTAA | |
| | GGCCAGCCAAGACGTTAGCATAGGAGTAGCATGGTACCAACAAA | |
| | AGCCTGGGAAGGCTCCCAAACTTCTCATTTATTCTGCTTCCTACCG | |
| | ATATACTGGTGTCCCAAGTAGATTTTCTGGCAGCGGATCTGGAAC | |
| | TGATTTTACATTGACTATCAGCTCCCTCCAGCCTGAGGACTTCGCT | |
| | ACTTATTACTGCCAACAGTACTACATTTATCCCTATACATTCGGTC | |
| | AAGGGACCAAAGTAGAGATCAAACGTACGGTGGCAGCTCCCAGC | |
| | GTTTTTATCTTTCCCCCATCCGACGAGCAGCTCAAGAGTGGCACTG | |
| | CCTCTGTAGTTTGTTTGCTGAATAACTTCTATCCACGTGAAGCAAA | |
| | AGTACAGTGGAAGGTCGATAATGCCCTTCAGAGCGGTAACAGCCA | |
| | AGAAAGTGTTACCGAGCAAGATTCCAAAGATTCCACTTACAGTCT | |
| | GTCCAGCACATTGACACTGAGTAAGGCTGATTACGAAAAACACAA | |
| | GGTGTACGCATGCGAGGTGACACACCAAGGTCTTTCATCTCCTGT | |
| | AACTAAGAGCTTTAACCGGGGAGAATGTGGTGGTGGGGGCAGCG | |
| | GGGGCGGAGGTAGTGGAGGCGGCGGTAGTGAACCAAAGAGTAGT | |
| | GACAAAACTCACACGTGCCCACCGTGCCCAGCACCTGAACTCCTG | |
| | GGGGGACCGTCAGTCTTCCTCTTCCCCCCAAAACCCAAGGACACC | |
| | CTCATGATCTCCCGGACCCCTGAGGTCACATGCGTGGTGGTGGAC | |
| | GTGAGCCACGAAGACCCTGAGGTCAAGTTCAACTGGTACGTGGAC | |
| | GGCGTGGAGGTGCATAATGCCAAGACAAAGCCGCGGGAGGAGCA | |
| | GTACAACAGCACGTACCGTGTGGTCAGCGTCCTCACCGTCCTGCA | |
| | CCAGGACTGGCTGAATGGCAAGGAGTACAAGTGCAAGGTCTCCA | |
| | ACAAAGCCCTCCCAGCCCCCATCGAGAAAACCATCTCCAAAGCCA | |
| | AAGGGCAGCCCCGAGAACCACAGGTGTACACCCTGCCCCCATGCC | |
| | GGGAGGAGATGACCAAGAACCAGGTCAGCCTGTGGTGCCTGGTC | |
| | AAAGGCTTCTATCCCAGCGACATCGCCGTGGAGTGGGAGAGCAAT | |
| | GGGCAGCCGGAGAACAACTACAAGACCACGCCTCCCGTGCTGGA | |
| | CTCCGACGGCTCCTTCTTCCTCTACAGCAAGCTCACCGTGGACAA | |
| | GAGCAGGTGGCAGCAGGGGAACGTCTTCTCATGCTCCGTGATGCA | |
| | TGAGGCTCTGCACAACCACTACACGCAGAAGAGCCTCTCCCTGTC | |
| | TCCGGGTAAA | |
| TL-S-PLC-Knob | GACATTCAGATGACCCAATCCCCCTCTAGCCTTTCAGCCTCCGTAG | 498 |
| | GGGACAGAGTTACAATAACCTGTAGGGCTAGTCAGGACGTTAATA | |
| | CAGCAGTCGCATGGTACCAGCAGAAGCCCGGTAAGGCTCCTAAGCT | |
| | TTTGATCTACAGTGCTTCTTTCCTGTATTCTGGTGTACCTAGCCGA | |
| | TTCTCAGGCTCTCGGAGTGGCACAGACTTCACTCTGACAATTTCAA | |
| | GTCTCCAGCCAGAAGATTTTGCAACCTACTACTGCCAACAACACT | |
| | ACACTACTCCTCCAACCTTCGGACAGGGCACAAAAGTAGAGATTA | |
| | AGCGTACGGTGGCTGCTCCAGATATTCAAATGACCCAAAGTCCAA | |
| | GTTCCCTTTCAGCATCTGTCGGTGATCGAGTCACTATAACTTGTAA | |
| | GGCCAGCCAAGACGTTAGCATAGGAGTAGCATGGTACCAACAAA | |
| | AGCCTGGGAAGGCTCCCAAACTTCTCATTTATTCTGCTTCCTACCG | |
| | ATATACTGGTGTCCCAAGTAGATTTTCTGGCAGCGGATCTGGAAC | |
| | TGATTTTACATTGACTATCAGCTCCCTCCAGCCTGAGGACTTCGCT | |
| | ACTTATTACTGCCAACAGTACTACATTTATCCCTATACATTCGGTT | |
| | GTGGGACCAAAGTAGAGATCAAACGTACGGTGGCAGCTCCCAGC | |
| | GTTTTTATCTTTCCCCCATCCGACGAGCAGCTCAAGAGTGGCACTG | |
| | CCTCTGTAGTTTGTTTGCTGAATAACTTCTATCCACGTGAAGCAAA | |
| | AGTACAGTGGAAGGTCGATAATGCCCTTCAGAGCGGTAACAGCCA | |
| | AGAAAGTGTTACCGAGCAAGATTCCAAAGATTCCACTTACAGTCT | |
| | GTCCAGCACATTGACACTGAGTAAGGCTGATTACGAAAAACACAA | |
| | GGTGTACGCATGCGAGGTGACACACCAAGGTCTTTCATCTCCTGT | |
| | AACTAAGAGCTTTAACCGGGGAGAATGTGGTGGTGGGGGCAGCG | |
| | GGGGCGGAGGTAGTGGAGGCGGCGGTAGTGAACCAAAGAGTAGT | |
| | GACAAAACTCACACGTGCCCACCGTGCCCAGCACCTGAACTCCTG | |
| | GGGGGACCGTCAGTCTTCCTCTTCCCCCCAAAACCCAAGGACACC | |
| | CTCATGATCTCCCGGACCCCTGAGGTCACATGCGTGGTGGTGGAC | |
| | GTGAGCCACGAAGACCCTGAGGTCAAGTTCAACTGGTACGTGGAC | |
| | GGCGTGGAGGTGCATAATGCCAAGACAAAGCCGCGGGAGGAGCA | |
| | GTACAACAGCACGTACCGTGTGGTCAGCGTCCTCACCGTCCTGCA | |
| | CCAGGACTGGCTGAATGGCAAGGAGTACAAGTGCAAGGTCTCCA | |
| | ACAAAGCCCTCCCAGCCCCCATCGAGAAAACCATCTCCAAAGCCA | |
| | AAGGGCAGCCCCGAGAACCACAGGTGTACACCCTGCCCCCATGCC | |
| | GGGAGGAGATGACCAAGAACCAGGTCAGCCTGTGGTGCCTGGTC | |
| | AAAGGCTTCTATCCCAGCGACATCGCCGTGGAGTGGGAGAGCAAT | |
| | GGGCAGCCGGAGAACAACTACAAGACCACGCCTCCCGTGCTGGA | |
| | CTCCGACGGCTCCTTCTTCCTCTACAGCAAGCTCACCGTGGACAA | |
| | GAGCAGGTGGCAGCAGGGGAACGTCTTCTCATGCTCCGTGATGCA | |
| | TGAGGCTCTGCACAACcactacACGCAGAAGAGCCTCTCCCTGTCT | |
| | CCGGGTAAA | |
| TLC-S-PLC-Knob | GACATTCAGATGACCCAATCCCCCTCTAGCCTTTCAGCCTCCGTAG | 499 |
| | GGGACAGAGTTACAATAACCTGTAGGGCTAGTCAGGACGTTAATA | |
| | CAGCAGTCGCATGGTACCAGCAGAAGCCCGGTAAGGCTCCTAAGCT | |
| | TTTGATCTACAGTGCTTCTTTCCTGTATTCTGGTGTACCTAGCCGA | |
| | TTCTCAGGCTCTCGGAGTGGCACAGACTTCACTCTGACAATTTCAA | |
| | GTCTCCAGCCAGAAGATTTTGCAACCTACTACTGCCAACAACACT | |
| | ACACTACTCCTCCAACCTTCGGATGTGGCACAAAAGTAGAGATTA | |
| | AGCGTACGGTGGCTGCTCCAGATATTCAAATGACCCAAAGTCCAA | |
| | GTTCCCTTTCAGCATCTGTCGGTGATCGAGTCACTATAACTTGTAA | |
| | GGCCAGCCAAGACGTTAGCATAGGAGTAGCATGGTACCAACAAA | |
| | AGCCTGGGAAGGCTCCCAAACTTCTCATTTATTCTGCTTCCTACCG | |
| | ATATACTGGTGTCCCAAGTAGATTTTCTGGCAGCGGATCTGGAAC | |
| | TGATTTTACATTGACTATCAGCTCCCTCCAGCCTGAGGACTTCGCT | |
| | ACTTATTACTGCCAACAGTACTACATTTATCCCTATACATTCGGTT | |
| | GTGGGACCAAAGTAGAGATCAAACGTACGGTGGCAGCTCCCAGC | |
| | GTTTTTATCTTTCCCCCATCCGACGAGCAGCTCAAGAGTGGCACTG | |
| | CCTCTGTAGTTTGTTTGCTGAATAACTTCTATCCACGTGAAGCAAA | |
| | AGTACAGTGGAAGGTCGATAATGCCCTTCAGAGCGGTAACAGCCA | |
| | AGAAAGTGTTACCGAGCAAGATTCCAAAGATTCCACTTACAGTCT | |
| | GTCCAGCACATTGACACTGAGTAAGGCTGATTACGAAAAACACAA | |
| | GGTGTACGCATGCGAGGTGACACACCAAGGTCTTTCATCTCCTGT | |
| | AACTAAGAGCTTTAACCGGGGAGAATGTGGTGGTGGGGGCAGCG | |
| | GGGGCGGAGGTAGTGGAGGCGGCGGTAGTGAACCAAAGAGTAGT | |
| | GACAAAACTCACACGTGCCCACCGTGCCCAGCACCTGAACTCCTG | |
| | GGGGGACCGTCAGTCTTCCTCTTCCCCCCAAAACCCAAGGACACC | |
| | CTCATGATCTCCCGGACCCCTGAGGTCACATGCGTGGTGGTGGAC | |
| | GTGAGCCACGAAGACCCTGAGGTCAAGTTCAACTGGTACGTGGAC | |
| | GGCGTGGAGGTGCATAATGCCAAGACAAAGCCGCGGGAGGAGCA | |
| | GTACAACAGCACGTACCGTGTGGTCAGCGTCCTCACCGTCCTGCA | |
| | CCAGGACTGGCTGAATGGCAAGGAGTACAAGTGCAAGGTCTCCA | |
| | ACAAAGCCCTCCCAGCCCCCATCGAGAAAACCATCTCCAAAGCCA | |
| | AAGGGCAGCCCCGAGAACCACAGGTGTACACCCTGCCCCCATGCC | |
| | GGGAGGAGATGACCAAGAACCAGGTCAGCCTGTGGTGCCTGGTC | |
| | AAAGGCTTCTATCCCAGCGACATCGCCGTGGAGTGGGAGAGCAAT | |
| | GGGCAGCCGGAGAACAACTACAAGACCACGCCTCCCGTGCTGGA | |
| | CTCCGACGGCTCCTTCTTCCTCTACAGCAAGCTCACCGTGGACAA | |
| | GAGCAGGTGGCAGCAGGGGAACGTCTTCTCATGCTCCGTGATGCA | |
| | TGAGGCTCTGCACAACCACTACACGCAGAAGAGCCTCTCCCTGTC | |
| | TCCGGGTAAA | |
| TL-L-PL-Knob | GACATTCAGATGACCCAATCCCCCTCTAGCCTTTCAGCCTCCGTAG | 500 |
| | GGGACAGAGTTACAATAACCTGTAGGGCTAGTCAGGACGTTAATA | |
| | CAGCAGTCGCATGGTACCAGCAGAAGCCCGGTAAGGCTCCTAAGCT | |
| | TTTGATCTACAGTGCTTCTTTCCTGTATTCTGGTGTACCTAGCCGA | |
| | TTCTCAGGCTCTCGGAGTGGCACAGACTTCACTCTGACAATTTCAA | |
| | GTCTCCAGCCAGAAGATTTTGCAACCTACTACTGCCAACAACACT | |
| | ACACTACTCCTCCAACCTTCGGACAGGGCACAAAAGTAGAGATTA | |
| | AGCGTACGGTGGCTGCTCCATCCGTTTTTATCTTTCCCCCAGATAT | |
| | TCAAATGACCCAAAGTCCAAGTTCCCTTTCAGCATCTGTCGGTGAT | |
| | CGAGTCACTATAACTTGTAAGGCCAGCCAAGACGTTAGCATAGGA | |
| | GTAGCATGGTACCAACAAAAGCCTGGGAAGGCTCCCAAACTTCTC | |
| | ATTTATTCTGCTTCCTACCGATATACTGGTGTCCCAAGTAGATTTT | |
| | CTGGCAGCGGATCTGGAACTGATTTTACATTGACTATCAGCTCCCT | |
| | CCAGCCTGAGGACTTCGCTACTTATTACTGCCAACAGTACTACATT | |
| | TATCCCTATACATTCGGTCAAGGGACCAAAGTAGAGATCAAACGT | |
| | ACGGTGGCAGCTCCCAGCGTTTTTATCTTTCCCCCATCCGACGAGC | |
| | AGCTCAAGAGTGGCACTGCCTCTGTAGTTTGTTTGCTGAATAACTT | |
| | CTATCCACGTGAAGCAAAAGTACAGTGGAAGGTCGATAATGCCCT | |
| | TCAGAGCGGTAACAGCCAAGAAAGTGTTACCGAGCAAGATTCCA | |
| | AAGATTCCACTTACAGTCTGTCCAGCACATTGACACTGAGTAAGG | |
| | CTGATTACGAAAAACACAAGGTGTACGCATGCGAGGTGACACAC | |
| | CAAGGTCTTTCATCTCCTGTAACTAAGAGCTTTAACCGGGGAGAA | |
| | TGTGGTGGTGGGGGCAGCGGGGGCGGAGGTAGTGGAGGCGGCGG | |
| | TAGTGAACCAAAGAGTAGTGACAAAACTCACACGTGCCCACCGTG | |
| | CCCAGCACCTGAACTCCTGGGGGGACCGTCAGTCTTCCTCTTCCCC | |
| | CCAAAACCCAAGGACACCCTCATGATCTCCCGGACCCCTGAGGTC | |
| | ACATGCGTGGTGGTGGACGTGAGCCACGAAGACCCTGAGGTCAA | |
| | GTTCAACTGGTACGTGGACGGCGTGGAGGTGCATAATGCCAAGAC | |
| | AAAGCCGCGGGAGGAGCAGTACAACAGCACGTACCGTGTGGTCA | |
| | GCGTCCTCACCGTCCTGCACCAGGACTGGCTGAATGGCAAGGAGT | |
| | ACAAGTGCAAGGTCTCCAACAAAGCCCTCCCAGCCCCCATCGAGA | |
| | AAACCATCTCCAAAGCCAAAGGGCAGCCCCGAGAACCACAGGTG | |
| | TACACCCTGCCCCCATGCCGGGAGGAGATGACCAAGAACCAGGTC | |
| | AGCCTGTGGTGCCTGGTCAAAGGCTTCTATCCCAGCGACATCGCC | |
| | GTGGAGTGGGAGAGCAATGGGCAGCCGGAGAACAACTACAAGAC | |
| | CACGCCTCCCGTGCTGGACTCCGACGGCTCCTTCTTCCTCTACAG | |
| | CAAGCTCACCGTGGACAAGAGCAGGTGGCAGCAGGGGAACGTCTT | |
| | CTCATGCTCCGTGATGCATGAGGCTCTGCACAACCACTACACGCA | |
| | GAAGAGCCTCTCCCTGTCTCCGGGTAAA | |
| TLC-L-PL-Knob | GACATTCAGATGACCCAATCCCCCTCTAGCCTTTCAGCCTCCGTAG | 501 |
| | GGGACAGAGTTACAATAACCTGTAGGGCTAGTCAGGACGTTAATA | |
| | CAGCAGTCGCATGGTACCAGCAGAAGCCCGGTAAGGCTCCTAAGCT | |
| | TTTGATCTACAGTGCTTCTTTCCTGTATTCTGGTGTACCTAGCCGA | |
| | TTCTCAGGCTCTCGGAGTGGCACAGACTTCACTCTGACAATTTCAA | |
| | GTCTCCAGCCAGAAGATTTTGCAACCTACTACTGCCAACAACACT | |
| | ACACTACTCCTCCAACCTTCGGATGTGGCACAAAAGTAGAGATTA | |
| | AGCGTACGGTGGCTGCTCCATCCGTTTTTATCTTTCCCCCAGATAT | |
| | TCAAATGACCCAAAGTCCAAGTTCCCTTTCAGCATCTGTCGGTGAT | |
| | CGAGTCACTATAACTTGTAAGGCCAGCCAAGACGTTAGCATAGGA | |
| | GTAGCATGGTACCAACAAAAGCCTGGGAAGGCTCCCAAACTTCTC | |
| | ATTTATTCTGCTTCCTACCGATATACTGGTGTCCCAAGTAGATTTT | |
| | CTGGCAGCGGATCTGGAACTGATTTTACATTGACTATCAGCTCCCT | |
| | CCAGCCTGAGGACTTCGCTACTTATTACTGCCAACAGTACTACATT | |
| | TATCCCTATACATTCGGTCAAGGGACCAAAGTAGAGATCAAACGT | |
| | ACGGTGGCAGCTCCCAGCGTTTTTATCTTTCCCCCATCCGACGAGC | |
| | AGCTCAAGAGTGGCACTGCCTCTGTAGTTTGTTTGCTGAATAACTT | |
| | CTATCCACGTGAAGCAAAAGTACAGTGGAAGGTCGATAATGCCCT | |
| | TCAGAGCGGTAACAGCCAAGAAAGTGTTACCGAGCAAGATTCCA | |
| | AAGATTCCACTTACAGTCTGTCCAGCACATTGACACTGAGTAAGG | |
| | CTGATTACGAAAAACACAAGGTGTACGCATGCGAGGTGACACAC | |
| | CAAGGTCTTTCATCTCCTGTAACTAAGAGCTTTAACCGGGGAGAA | |
| | TGTGGTGGTGGGGGCAGCGGGGGCGGAGGTAGTGGAGGCGGCGG | |
| | TAGTGAACCAAAGAGTAGTGACAAAACTCACACGTGCCCACCGTG | |
| | CCCAGCACCTGAACTCCTGGGGGGACCGTCAGTCTTCCTCTTCCCC | |
| | CCAAAACCCAAGGACACCCTCATGATCTCCCGGACCCCTGAGGTC | |
| | ACATGCGTGGTGGTGGACGTGAGCCACGAAGACCCTGAGGTCAA | |
| | GTTCAACTGGTACGTGGACGGCGTGGAGGTGCATAATGCCAAGAC | |
| | AAAGCCGCGGGAGGAGCAGTACAACAGCACGTACCGTGTGGTCA | |
| | GCGTCCTCACCGTCCTGCACCAGGACTGGCTGAATGGCAAGGAGT | |
| | ACAAGTGCAAGGTCTCCAACAAAGCCCTCCCAGCCCCCATCGAGA | |
| | AAACCATCTCCAAAGCCAAAGGGCAGCCCCGAGAACCACAGGTG | |
| | TACACCCTGCCCCCATGCCGGGAGGAGATGACCAAGAACCAGGTC | |
| | AGCCTGTGGTGCCTGGTCAAAGGCTTCTATCCCAGCGACATCGCC | |
| | GTGGAGTGGGAGAGCAATGGGCAGCCGGAGAACAACTACAAGAC | |
| | CACGCCTCCCGTGCTGGACTCCGACGGCTCCTTCTTCCTCTACAGC | |
| | AAGCTCACCGTGGACAAGAGCAGGTGGCAGCAGGGGAACGTCTT | |
| | CTCATGCTCCGTGATGCATGAGGCTCTGCACAACCACTACACGCA | |
| | GAAGAGCCTCTCCCTGTCTCCGGGTAAA | |
| TL-L-PLC-Knob | GACATTCAGATGACCCAATCCCCCTCTAGCCTTTCAGCCTCCGTAG | 502 |
| | GGGACAGAGTTACAATAACCTGTAGGGCTAGTCAGGACGTTAATA | |
| | CAGCAGTCGCATGGTACCAGCAGAAGCCCGGTAAGGCTCCTAAGCT | |
| | TTTGATCTACAGTGCTTCTTTCCTGTATTCTGGTGTACCTAGCCGA | |
| | TTCTCAGGCTCTCGGAGTGGCACAGACTTCACTCTGACAATTTCAA | |
| | GTCTCCAGCCAGAAGATTTTGCAACCTACTACTGCCAACAACACT | |
| | ACACTACTCCTCCAACCTTCGGACAGGGCACAAAAGTAGAGATTA | |
| | AGCGTACGGTGGCTGCTCCATCCGTTTTTATCTTTCCCCCAGATAT | |
| | TCAAATGACCCAAAGTCCAAGTTCCCTTTCAGCATCTGTCGGTGAT | |
| | CGAGTCACTATAACTTGTAAGGCCAGCCAAGACGTTAGCATAGGA | |
| | GTAGCATGGTACCAACAAAAGCCTGGGAAGGCTCCCAAACTTCTC | |
| | ATTTATTCTGCTTCCTACCGATATACTGGTGTCCCAAGTAGATTTT | |
| | CTGGCAGCGGATCTGGAACTGATTTTACATTGACTATCAGCTCCCT | |
| | CCAGCCTGAGGACTTCGCTACTTATTACTGCCAACAGTACTACATT | |
| | TATCCCTATACATTCGGTTGTGGGACCAAAGTAGAGATCAAACGT | |
| | ACGGTGGCAGCTCCCAGCGTTTTTATCTTTCCCCCATCCGACGAGC | |
| | AGCTCAAGAGTGGCACTGCCTCTGTAGTTTGTTTGCTGAATAACTT | |
| | CTATCCACGTGAAGCAAAAGTACAGTGGAAGGTCGATAATGCCCT | |
| | TCAGAGCGGTAACAGCCAAGAAAGTGTTACCGAGCAAGATTCCA | |
| | AAGATTCCACTTACAGTCTGTCCAGCACATTGACACTGAGTAAGG | |
| | CTGATTACGAAAAACACAAGGTGTACGCATGCGAGGTGACACAC | |
| | CAAGGTCTTTCATCTCCTGTAACTAAGAGCTTTAACCGGGGAGAA | |
| | TGTGGTGGTGGGGGCAGCGGGGGCGGAGGTAGTGGAGGCGGCGG | |
| | TAGTGAACCAAAGAGTAGTGACAAAACTCACACGTGCCCACCGTG | |
| | CCCAGCACCTGAACTCCTGGGGGGACCGTCAGTCTTCCTCTTCCCC | |
| | CCAAAACCCAAGGACACCCTCATGATCTCCCGGACCCCTGAGGTC | |
| | ACATGCGTGGTGGTGGACGTGAGCCACGAAGACCCTGAGGTCAA | |
| | GTTCAACTGGTACGTGGACGGCGTGGAGGTGCATAATGCCAAGAC | |
| | AAAGCCGCGGGAGGAGCAGTACAACAGCACGTACCGTGTGGTCA | |
| | GCGTCCTCACCGTCCTGCACCAGGACTGGCTGAATGGCAAGGAGT | |
| | ACAAGTGCAAGGTCTCCAACAAAGCCCTCCCAGCCCCCATCGAGA | |
| | AAACCATCTCCAAAGCCAAAGGGCAGCCCCGAGAACCACAGGTG | |
| | TACACCCTGCCCCCATGCCGGGAGGAGATGACCAAGAACCAGGTC | |
| | AGCCTGTGGTGCCTGGTCAAAGGCTTCTATCCCAGCGACATCGCC | |
| | GTGGAGTGGGAGAGCAATGGGCAGCCGGAGAACAACTACAAGAC | |
| | CACGCCTCCCGTGCTGGACTCCGACGGCTCCTTCTTCCTCTACAGC | |
| | AAGCTCACCGTGGACAAGAGCAGGTGGCAGCAGGGGAACGTCTT | |
| | CTCATGCTCCGTGATGCATGAGGCTCTGCACAACCACTACACGCA | |
| | GAAGAGCCTCTCCCTGTCTCCGGGTAAA | |
| TLC-L-PLC-Knob | GACATTCAGATGACCCAATCCCCCTCTAGCCTTTCAGCCTCCGTAG | 503 |
| | GGGACAGAGTTACAATAACCTGTAGGGCTAGTCAGGACGTTAATA | |
| | CAGCAGTCGCATGGTACCAGCAGAAGCCCGGTAAGGCTCCTAAGCT | |
| | TTTGATCTACAGTGCTTCTTTCCTGTATTCTGGTGTACCTAGCCGA | |
| | TTCTCAGGCTCTCGGAGTGGCACAGACTTCACTCTGACAATTTCAA | |
| | GTCTCCAGCCAGAAGATTTTGCAACCTACTACTGCCAACAACACT | |
| | ACACTACTCCTCCAACCTTCGGATGTGGCACAAAAGTAGAGATTA | |
| | AGCGTACGGTGGCTGCTCCATCCGTTTTTATCTTTCCCCCAGATAT | |
| | TCAAATGACCCAAAGTCCAAGTTCCCTTTCAGCATCTGTCGGTGAT | |
| | CGAGTCACTATAACTTGTAAGGCCAGCCAAGACGTTAGCATAGGA | |
| | GTAGCATGGTACCAACAAAAGCCTGGGAAGGCTCCCAAACTTCTC | |
| | ATTTATTCTGCTTCCTACCGATATACTGGTGTCCCAAGTAGATTTT | |
| | CTGGCAGCGGATCTGGAACTGATTTTACATTGACTATCAGCTCCCT | |
| | CCAGCCTGAGGACTTCGCTACTTATTACTGCCAACAGTACTACATT | |
| | TATCCCTATACATTCGGTTGTGGGACCAAAGTAGAGATCAAACGT | |
| | ACGGTGGCAGCTCCCAGCGTTTTTATCTTTCCCCCATCCGACGAGC | |
| | AGCTCAAGAGTGGCACTGCCTCTGTAGTTTGTTTGCTGAATAACTT | |
| | CTATCCACGTGAAGCAAAAGTACAGTGGAAGGTCGATAATGCCCT | |
| | TCAGAGCGGTAACAGCCAAGAAAGTGTTACCGAGCAAGATTCCA | |
| | AAGATTCCACTTACAGTCTGTCCAGCACATTGACACTGAGTAAGG | |
| | CTGATTACGAAAAACACAAGGTGTACGCATGCGAGGTGACACAC | |
| | CAAGGTCTTTCATCTCCTGTAACTAAGAGCTTTAACCGGGGAGAA | |
| | TGTGGTGGTGGGGGCAGCGGGGGCGGAGGTAGTGGAGGCGGCGG | |
| | TAGTGAACCAAAGAGTAGTGACAAAACTCACACGTGCCCACCGTG | |
| | CCCAGCACCTGAACTCCTGGGGGGACCGTCAGTCTTCCTCTTCCCC | |
| | CCAAAACCCAAGGACACCCTCATGATCTCCCGGACCCCTGAGGTC | |
| | ACATGCGTGGTGGTGGACGTGAGCCACGAAGACCCTGAGGTCAA | |
| | GTTCAACTGGTACGTGGACGGCGTGGAGGTGCATAATGCCAAGAC | |
| | AAAGCCGCGGGAGGAGCAGTACAACAGCACGTACCGTGTGGTCA | |
| | GCGTCCTCACCGTCCTGCACCAGGACTGGCTGAATGGCAAGGAGT | |
| | ACAAGTGCAAGGTCTCCAACAAAGCCCTCCCAGCCCCCATCGAGA | |
| | AAACCATCTCCAAAGCCAAAGGGCAGCCCCGAGAACCACAGGTG | |
| | TACACCCTGCCCCCATGCCGGGAGGAGATGACCAAGAACCAGGTC | |
| | AGCCTGTGGTGCCTGGTCAAAGGCTTCTATCCCAGCGACATCGCC | |
| | GTGGAGTGGGAGAGCAATGGGCAGCCGGAGAACAACTACAAGAC | |
| | CACGCCTCCCGTGCTGGACTCCGACGGCTCCTTCTTCCTCTACAG | |
| | CAAGCTCACCGTGGACAAGAGCAGGTGGCAGCAGGGGAACGTCTT | |
| | CTCATGCTCCGTGATGCATGAGGCTCTGCACAACCACTACACGCA | |
| | GAAGAGCCTCTCCCTGTCTCCGGGTAAA | |

TABLE 34

| | VH1-linker-VH2- | VL1-linker-VL2- | |
|---|---|---|---|
| | CH1-Fc(Knob) | CL-linker-Fc(Knob) | Fc(Hole) |
| HP501 | SEQ ID NO: 51 | SEQ ID NO: 59 | SEQ ID NO: 7 |
| HP502 | SEQ ID NO: 52 | SEQ ID NO: 60 | SEQ ID NO: 7 |
| HP503 | SEQ ID NO: 53 | SEQ ID NO: 61 | SEQ ID NO: 7 |
| HP504 | SEQ ID NO: 54 | SEQ ID NO: 62 | SEQ ID NO: 7 |
| HP505 | SEQ ID NO: 51 | SEQ ID NO: 63 | SEQ ID NO: 7 |
| HP506 | SEQ ID NO: 52 | SEQ ID NO: 64 | SEQ ID NO: 7 |
| HP507 | SEQ ID NO: 53 | SEQ ID NO: 65 | SEQ ID NO: 7 |
| HP508 | SEQ ID NO: 54 | SEQ ID NO: 66 | SEQ ID NO: 7 |
| HP509 | SEQ ID NO: 55 | SEQ ID NO: 59 | SEQ ID NO: 7 |
| HP510 | SEQ ID NO: 56 | SEQ ID NO: 60 | SEQ ID NO: 7 |
| HP511 | SEQ ID NO: 57 | SEQ ID NO: 61 | SEQ ID NO: 7 |
| HP512 | SEQ ID NO: 58 | SEQ ID NO: 62 | SEQ ID NO: 7 |
| HP513 | SEQ ID NO: 55 | SEQ ID NO: 63 | SEQ ID NO: 7 |
| HP514 | SEQ ID NO: 56 | SEQ ID NO: 64 | SEQ ID NO: 7 |
| HP515 | SEQ ID NO: 57 | SEQ ID NO: 65 | SEQ ID NO: 7 |
| HP516 | SEQ ID NO: 58 | SEQ ID NO: 66 | SEQ ID NO: 7 |

[0348] Purity was analyzed by size exclusion chromatography in the same manner as described in Example 1 (FIG. 27, Table 35). The analysis showed that HP503, HP507, HP511, and HP515, in which the first V domain is wild type and the second V domain is Cys substituted variant (VH 44C, VL 100C), have an excellent purity (FIG. 27, Table 35).

TABLE 35

| Clone name | Monomer purity (%) |
|---|---|
| HP501 | 93.06 |
| HP502 | 94.91 |
| HP503 | 96.45 |
| HP504 | 86.77 |
| HP505 | 92.94 |
| HP506 | 82.89 |
| HP507 | 97.31 |
| HP508 | 57.51 |
| HP509 | 90.88 |
| HP510 | 86.56 |
| HP511 | 96.95 |
| HP512 | 68.52 |
| HP513 | 89.89 |
| HP514 | 79.31 |
| HP515 | 96.20 |
| HP516 | 58.07 |

[0349] The binding constants of HP501, HP502, HP503, HP504, HP505, HP506, HP507, HP508, HP509, HP510, HP511, HP512, HP513, HP514, HP515, and HP516 to D2 region and D4 region in HER2 protein were determined using the Octet Red96e (Sartorius). In order to analyze the binding constants of the sixteen antibodies to the D2 region, the human HER2 recombinant protein (R&D systems, 1129-ER) was loaded onto the Anti-Penta-HIS (HIS1K) biosensor (Sartorius, 18-5120) and then saturated with 100 nM trastuzumab which targets the D4 region. Thereafter, the sixteen antibodies were added in a binding reaction (300 seconds) and a dissociation reaction (600 seconds) at a concentration of 100 nM, and their affinities for the D2 region were calculated (Table 36). In order to analyze the binding constants of the sixteen antibodies to the D4 region, the human HER2 recombinant protein (R&D systems, 1129-ER) was loaded onto the Anti-Penta-HIS (HIS1K) biosensor (Sartorius, 18-5120), and then saturated with 100 nM pertuzumab which targets the D2 region. Thereafter, the sixteen antibodies were added in a binding reaction (300 seconds) and a dissociation reaction (600 seconds) at a concentration of 100 nM, and their affinities for the D4 region were calculated (Table 36). The binding constants of HP507, HP511, and HP515 to D2 region were 2.285, 3.267, and 2.012 nM, respectively, showing excellent binding affinities to the D2 region compared to other clones (Table 36). HP503 has a binding constant of 8.098 nM to the D2 region and shows a relatively low binding ability to the D2 region compared to HP507, HP511, and HP515. However, it was found that when measuring the binding constant to the D4 region, the binding constants of HP503, HP507, HP511, and HP515 were 0.181, 0.228, 0.162, and 0.227 nM, respectively, demonstrating strong binding affinity Table 36).

TABLE 36

| 100 nM | | | | | | |
|---|---|---|---|---|---|---|
| Single | Binding kinetics of mAbs to D2 epitope | | | Binding kinetics of mAbs to D4 epitope | | |
| Kinetics | K_{D} (nM) | Kₐ (1/Ms) | K_{d} (1/s) | K_{D} (nM) | Kₐ (1/Ms) | K_{d} (1/s) |
| HP501 | 13.009 | 8.05E+03 | 1.05E−04 | 0.218 | 2.00E+05 | 4.36E−05 |
| HP502 | 8.433 | 8.97E+03 | 7.56E−05 | 0.531 | 1.47E+05 | 7.82E−05 |
| HP503 | 8.098 | 4.69E+03 | 3.80E−05 | 0.181 | 2.14E+05 | 3.87E−05 |
| HP504 | 7.304 | 2.53E+04 | 1.85E−04 | 0.788 | 1.13E+05 | 8.94E−05 |
| HP505 | 5.882 | 1.41E+04 | 8.30E−05 | 0.586 | 1.50E+05 | 8.79E−05 |
| HP506 | 5.682 | 1.21E+04 | 6.89E−05 | 0.611 | 1.37E+05 | 8.37E−05 |
| HP507 | 2.285 | 1.85E+04 | 4.23E−05 | 0.228 | 1.99E+05 | 4.53E−05 |
| HP508 | 6.490 | 2.36E+04 | 1.53E−04 | 1.219 | 8.44E+04 | 1.03E−04 |
| HP509 | 7.962 | 1.33E+04 | 1.06E−04 | 0.393 | 1.72E+05 | 6.77E−05 |
| HP510 | 10.736 | 9.86E+03 | 1.06E−04 | 0.336 | 1.97E+05 | 6.60E−05 |
| HP511 | 3.267 | 1.47E+04 | 4.81E−05 | 0.162 | 2.27E+05 | 3.67E−05 |
| HP512 | 7.615 | 2.80E+04 | 2.13E−04 | 0.667 | 1.12E+05 | 7.47E−05 |
| HP513 | 4.739 | 2.17E+04 | 1.03E−04 | 0.381 | 1.95E+05 | 7.43E−05 |
| HP514 | 5.920 | 1.78E+04 | 1.06E−04 | 0.451 | 1.74E+05 | 7.82E−05 |
| HP515 | 2.012 | 2.89E+04 | 5.81E−05 | 0.227 | 2.14E+05 | 4.87E−05 |
| HP516 | 5.094 | 3.29E+04 | 1.67E−04 | 0.607 | 1.23E+05 | 7.46E−05 |

[0350] The binding constants of HP503, HP507, HP511, and P515 to the HER2 extracellular domain (ECD) were measured using Octet Red96e (Sartorius). The human HER2 recombinant protein (R&D systems, 1129-ER) was loaded onto the Anti-Penta-HIS (HIS1K) biosensor (Sartorius, 18-5120). HP503 or P57 or P5 or) P515 at a concentration of 0.25, 0.5, 1, 2, 4, or 8 nM were added in a binding reaction (600 seconds) and a dissociation reaction (1,800 seconds) in the sensor loaded with the HER2 protein, and the binding constants were calculated (FIGS. 28a to 28d, Table 37). It was found that HP507, HP511, and HP515 had a dissociation constant (<1.0E-07 1/s) that exceeded the measurement limit of the equipment under the following analysis conditions (FIGS. 28a to 28d, Table 37).

TABLE 37

| | K_{D} (nM) | Kₐ (1/Ms) | K_{d} (1/s) |
|---|---|---|---|
| HP503 | 6.57E−12 | 4.69E+05 | 3.08E−06 |
| HP507 | <1.0E−12 | 4.58E+05 | <1.0E−07 |
| HP511 | <1.0E−12 | 5.20E+05 | <1.0E−07 |
| HP515 | <1.0E−12 | 4.14E+05 | <1.0E−07 |

[0351] The measured binding constants of HP503, HP507, HP511, and BP515 to Fcγ receptors were analyzed using Octet Red96e (Sartorius) in the same manner as described in Example 10 (FIGS. 29a to 29d, Table 38). The analysis showed that HP503, HP507, HP511, and BP515 have excellent binding affinities to FcγRI (CD64), FcγRIIA (CD32A, 131R), and FcγRIIIA (CD16A, 176V) compared to human IgG1, trastuzumab, pertuzumab, and margetuximab (FIGS. 21a to 21h, FIGS. 22a to 22h, FIGS. 23a to 23h, FIGS. 29a to 29d, and Tables 29 and 38).

TABLE 38

| | FcγRI (CD64) | | | FcγRIIA (CD32A, 131R) | | | FcγRIIIA (CD16A, 176V) | | |
|---|---|---|---|---|---|---|---|---|---|
| Antigen | KD | Ka | Kd | KD | Ka | Kd | KD | Ka | Kd |
| Antibody | (nM) | (1/Ms) | (1/s) | (nM) | (1/Ms) | (1/s) | (nM) | (1/Ms) | (1/s) |
| HP503 | 0.22 | 3.46E+05 | 7.67E−05 | 3.69 | 1.58E+06 | 5.81E−03 | 2.42 | 6.60E+05 | 1.60E−03 |
| HP507 | 0.20 | 3.19E+05 | 6.37E−05 | 3.38 | 1.39E+06 | 4.70E−03 | 2.45 | 6.33E+05 | 1.55E−03 |
| HP511 | 0.22 | 3.00E+05 | 6.63E−05 | 4.40 | 1.48E+06 | 6.53E−03 | 2.56 | 6.19E+05 | 1.58E−03 |
| HP515 | 0.20 | 3.05E+05 | 6.13E−05 | 13.31 | 1.25E+06 | 4.15E−03 | 2.31 | 5.70E+05 | 1.32E−03 |

[0352] The binding constants of HP503, HP507, BP511, and BP515 to the neonatal Fc receptor (FcRn) were measured using Octet Red96e (Sartorius). HP503, HP507, BP511, HP515, human IgG1 (Bio X cell, BE0297), trastuzumab, pertuzumab, and margetuximab were loaded onto the anti-human Fab-CH1 2nd generation (FAB2G) biosensor (Sartorius, 18-5126), and a binding and a dissociation time were set to be 120 seconds, respectively (FIGS. 30a to 30b, Table 39). For analysis, Kinetics Buffer (Sartorius, 18-1105) was used at pH 6.0.

TABLE 39

| Antibodies | K_{D} (nM) | Kₐ (1/Ms) | K_{d} (1/s) |
|---|---|---|---|
| HP503 | 219.28 | 6.43E+04 | 1.41E−02 |
| HP507 | 190.85 | 6.64E+04 | 1.27E−02 |
| HP511 | 306.41 | 6.46E+04 | 1.98E−02 |
| HP515 | 193.12 | 6.98E+04 | 1.35E−02 |
| Human IgG1 | 149.02 | 9.78E+05 | 1.46E−01 |
| Trastuzumab | 283.94 | 5.23E+05 | 1.49E−01 |
| Pertuzumab | 321.85 | 4.79E+04 | 1.54E−02 |
| Margetuximab | 282.64 | 4.04E+04 | 1.14E−02 |

### Example 13. Analysis of Complement-Dependent Cytotoxicity

[0353] For the analysis of complement-dependent cytotoxicity, BT474 (HER2 3+; high) breast cancer cell line and NCI-N87 (HER2 3+; high) gastric cancer cell line were used. The cells were diluted in cell culture medium and dispensed in a 96-well plate at 10,000 cells per well. The cells, antibodies, and human serum (Sigma, H4522) were each reacted at a volume ratio of 1:1:1.

[0354] In order to identify a dose-response relationship, human IgG1, trastuzumab (TRA), trastuzumab+pertuzumab (TRA+PER), H01, and H01+P01 were serially diluted by a factor of two six times from initial concentration of 1200 nM, and the reaction was carried out from 400 nM (another three-fold dilution when dispensed). The human serum was diluted and dispensed in the culture medium to a final concentration of 25%, and the mixture of the cells, antibodies, and human serum was incubated for 5 hours in a humidified incubator at 37° C. and 5% (v/v) C02 conditions.

[0355] Cell Titer Glo-Reagent (Promega, G9243) previously dissolved at 4° C. was dispensed into each well in an equal volume of the mixed culture medium, and then the cell lysis was induced using a plate shaker (Allsheng, MX100-4A) with agitation at 500 rpm for 2 minutes. In order to stabilize the luminescence signal, the mixture was incubated at room temperature for 10 minutes and then analyzed using a plate reader equipment (Envision; PerkinElmer, 2105-0010) (FIGS. 31a to 31b). The complement-dependent cytotoxicity activity (CDC activity) was calculated as follows.

$$C D C activity ( \% ) = 100 \times [ 1 - ( luminescence with experimental antibody / luminiscence without antibody ) ] \qquad 〈 Equation 1 〉$$

[0356] Human IgG1, trastuzumab (TRA), trastuzumab+pertuzumab (TRA+PER), and H01 did not induce CDC responses in BT474 and NCI-N87 cell lines (FIGS. 31a to 31b). It was shown that CDC is induced in both cell lines only when H01 is treated in combination with P01 (FIGS. 31a to 31b).

### Example 14. Analysis of Antibody-Dependent Cytotoxicity

[0357] NCI-N87 (HER2 3+; high), MDA-MB-453(HER2 2+; Mid), SNU-601 (HER2 1+; low), and SNU-5 (HER2 1+; low) cancer cell lines were used for antibody-dependent cell-mediated cytotoxicity analysis (FIGS. 32a, 32b, 32c, and 32d). Each cancer cell line was seeded at 1.0×10⁴ cells/well in a 96-well plate. Thereafter, each antibody was diluted and treated in culture medium to an appropriate concentration. Peripheral blood mononuclear cells (PBMC) isolated on the same day were used as effector cells and treated at 1.5×10⁵ cells/well to make the number of PBMC 15 times more than the number of target cells (E:T ratio=15:1).

[0358] After treatment, the cells were incubated for 18 hours in a humidified incubator at 37° C. and 5% (v/v) C02 conditions, and then cytotoxicity was measured using a cytotoxicity detection kit (LDH) (Roche, 11644793001) (FIGS. 32a, 32b, 32c, and 32d). Cytotoxicity was calculated using the following formula for antibody-dependent cytotoxicity.

Cytotoxicity (%)=[(Test release-spontaneous release)/(Maximum release-spontaneous release)]×100 <Equation 2>

[0359] H01 showed excellent cytotoxicity at a low concentration compared to trastuzumab in NCI-N87 (HER2 3+; high) and MDA-MB-453 (HER2 2+; Mid) cancer cell lines (FIGS. 32a and 32b). Cytotoxicity analysis in SNU-601 (HER2 1+; low) and SNU-5 (HER2 1+; low) cancer cell lines H01 showed excellent cytotoxicity of H01 compared to that of trastuzumab (FIGS. 32c and 32d).

### Example 15. Evaluation of Efficacy in Xenograft Mouse Models

[0360] Efficacy in the SNU-5 (HER2 1+; low) gastric cancer cell line-derived xenograft model was evaluated using 6-week-old female SCID mice (C.B-17/NcrKoat-Prkdc^{scid}, Koatech) (FIG. 33a). The SNU-5 cancer cell line was diluted in PBS at 1×10⁷ cells/100 μL and mixed with MATRIGEL® Growth Factor Reduced (GFR) Basement Membrane Matrix (Corning, 354230) at a ratio of 1:1, and 100 μL of the mixture was transplanted subcutaneously into the right flank, and tumor growth was monitored. Mice were regrouped so that the average tumor volume was about 107 mm³, and PBS (vehicle), 5 mg/kg H01, 5 mg/kg H01+5 mg/kg P01, 5 mg/kg HP507, 5 mg/kg trastuzumab, 5 mg/kg trastuzumab+5 mg/kg pertuzumab were administered intravenously (I.V.) once a week for a total of 6 weeks (FIG. 33a). According to the analysis, H01 alone showed superior antitumor activity compared to trastuzumab and trastuzumab+pertuzumab (FIG. 33a). It was shown that H01+P01 induces improved antitumor activity compared to H01 alone, and HP507 induces the strongest antitumor activity in the SNU-5 gastric cancer xenograft model (FIG. 33a).

[0361] In addition, efficacy in the SNU-5 (HER2 1+; low) gastric cancer cell line-derived xenograft model was evaluated using 6-week-old female BALB/c-nu mice (ORIENT BIO INC.) (FIG. 33b). The SNU-5 cancer cell line was diluted in PBS at 1×10⁷ cells/100 μL and mixed with MATRIGEL® Growth Factor Reduced (GFR) Basement Membrane Matrix (Corning, 354230) at a ratio of 1:1, and 100 μL of the mixture was transplanted subcutaneously into the right flank, and tumor growth was observed. Mice were regrouped so that the average tumor volume was about 122 mm³, and 50 mg/kg Intravenous Immunoglobulin (IVIG; LIV-r, SK Plasma) was administered to all mice twice a week for 6 weeks (FIG. 33b). PBS (vehicle), 1 mg/kg trastuzumab, 1 mg/kg pertuzumab, 0.5 mg/kg trastuzumab+0.5 mg/kg pertuzumab, 1 mg/kg H01, 1 mg/kg P01, and 0.5 mg/kg H01+0.5 mg/kg P01 were administered intraperitoneally (I.P.) twice a week for a total of 6 weeks (FIG. 33b). The analysis showed that H01, P01, and H01+P01 induce superior antitumor activity compared to trastuzumab, pertuzumab, and trastuzumab+pertuzumab (FIG. 33b).

[0362] Efficacy in the SNU-601 (HER2 1+; low) gastric cancer cell line-derived xenograft model was evaluated using 6-week-old female SCID mice (C.B-17/NcrKoat-Prkdc^{scid}, Koatech). The SNU-5 cancer cell line was diluted in PBS at 1×10⁷ cells/100 μL and mixed with MATRIGEL® Growth Factor Reduced (GFR) Basement Membrane Matrix (Corning, 354230) at a ratio of 1:1, and 100 μL of the mixture was transplanted subcutaneously into the right flank, and tumor growth was observed. Mice were regrouped so that the average tumor volume was about 142 mm³, and PBS (vehicle), 5 mg/kg H01, 5 mg/kg trastuzumab, and 5 mg/kg trastuzumab+5 mg/kg pertuzumab were administered intraperitoneally (I.P.) twice a week for a total of 6 weeks (FIG. 34). Since there are no antibodies present in the blood of the SCID mice, 50 mg/kg Intravenous Immunoglobulin (IVIG; LIV-r, SK Plasma) was administered to all mice twice a week for 6 weeks to simulate the actual human blood environment (FIG. 34). In the SNU-601 gastric cancer xenograft model, H01 alone induced most superior antitumor activity (FIG. 34).

[0363] Efficacy in the NCI-N87 (HER2 3+; high) gastric cancer cell line-derived xenograft model was evaluated using 6-week-old female SCID mice (C.B-17/NcrKoat-Prkdc^{scid}, Koatech). The NCI-N87 cancer cell line was diluted in PBS at 5×10⁶ cells/100 μL and mixed with MATRIGEL® Growth Factor Reduced (GFR) Basement Membrane Matrix (Corning, 354230) at a ratio of 1:1, and 100 μL of the mixture was transplanted subcutaneously into the right flank, and tumor growth was observed. Mice were regrouped so that the average tumor volume was about 146 mm³, and PBS (vehicle), 0.2 mg/kg H01, 5 mg/kg H01, 0.2 mg/kg trastuzumab, and 5 mg/kg trastuzumab were administered intraperitoneally (I.P.) twice a week for a total of 6 weeks (FIG. 35). Since there are no antibodies present in the blood of the SCID mice, 50 mg/kg Intravenous Immunoglobulin (IVIG; LIV-r, SK Plasma) was administered to all mice twice a week for 6 weeks to simulate the actual human blood environment (FIG. 35). The analysis showed that H01 induces superior antitumor activity compared to trastuzumab when the antibodies were administered at 5 mg/kg and at 0.2 mg/kg (FIG. 35).

### Example 16. Evaluation of Antitumor Activity in CT26-HER2 Syngeneic Mouse Model

[0364] The nucleotide (SEQ ID NO: 566, Table 40) encoding the human HER2 protein (SEQ ID NO: 567, Table 40) was cloned into a protein expression vector (ORIGENE, PS100020) containing a neomycin-resistance gene to construct the human HER2 expression vector pCMV6-AC-hHER2 (FIG. 36, Table 40).

TABLE 40

| Name | Sequence | SEQ ID NO |
|---|---|---|
| Human HER2 | ATGGAGCTGGCGCCTTGTGCCGCTGGGGGCTCCTCCTCGCCCTCTTGCCCCCCGGAGC | 566 |
| nucleotide | CGCGAGCACCCAAGTGTGCACCGGCACAGACATGAAGCTGCGGCTCCCTGCCAGTCCCG | |
| sequence | AGACCCACCTGGACATGCTCCGCCACCTCTACCAGGGCTGCCAGGTGGTGCAGGGAAAC | |
| | CTGGAACTCACCTACCTGCCCACCAATGCCAGCCTGTCCTTCCTGCAGGATATCCAGGA | |
| | GGTGCAGGGCTACGTGCTCATCGCTCACAACCAAGTGAGGCAGGTCCCACTGCAGAGGC | |
| | TGCGGATTGTGCGAGGCACCCAGCTCTTTGAGGACAACTATGCCCTGGCCGTGCTAGAC | |
| | AATGGAGACCCGCTGAACAATACCACCCCTGTCACAGGGGCCTCCCCAGGAGGCCTGCG | |
| | GGAGCTGCAGCTTCGAAGCCTCACAGAGTCTTGAAAGGAGGGGTCTTGATCCAGCGGA | |
| | ACCCCCAGCTCTGCTACCAGGACACGATTTTGTGGAAGGACATCTTCCACAAGAACAAC | |
| | CAGCTGGCTCTCACACTGATAGACACCAACCGCTCTCGGGCCTGCCACCCCTGTTCTCC | |
| | GATGTGTAAGGGCTCCCGCTGCTGGGGAGAGAGTTCTGAGGATTGTCAGAGCCTGACGC | |
| | GCACTGTCTGTGCCGGTGGCTGTGCCCGCTGCAAGGGGCCAGCCCACTGACTGCTGC | |
| | CATGAGCAGTGTGCTGCCGGCTGCACGGGCCCCAAGCACTCTGACTGCCTGGCCTGCCT | |
| | CCACTTCAACCACAGTGGCATCTGTGAGCTGCACTGCCCAGCCCTGGTCACCTACAACA | |
| | CAGACACGTTTGAGTCCATGCCCAATCCCGAGGGCCGGTATACATTCGGCGCCAGCTGT | |
| | GTGACTGCCTGTCCCTACAACTACCTTTCTACGGACGTGGGATCCTGCACCCTCGTCTG | |
| | CCCCCTGCACAACCAAGAGGTGACAGCAGAGGATGGAACACAGCGGTGTGAGAAGTGCA | |
| | GCAAGCCCTGTGCCCGAGTGTGCTATGGTCTGGGCATGGAGCACTTGCGAGAGGTGAGG | |
| | GCAGTTACCAGTGCCAATATCCAGGAGTTTGCTGGCTGCAAGAAGATCTTTGGGAGCCT | |
| | GGCATTTCTGCCGGAGAGCTTTGATGGGGACCCAGCCTCCAACACTGCCCCGCTCCAGC | |
| | CAGAGCAGCTCCAAGTGTTTGAGACTCTGGAAGAGATCACAGGTTACCTATACATCTCA | |
| | GCATGGCCGGACAGCCTGCCTGACCTCAGCGTCTTCCAGAACCTGCAAGTAATCCGGGG | |
| | ACGAATTCTGCACAATGGCGCCTACTCGCTGACCCTGCAAGGGCTGGGCATCAGCTGGC | |
| | TGGGGCTGCGCTCACTGAGGGAACTGGGCAGTGGACTGGCCCTCATCCACCATAACACC | |
| | CACCTCTGCTTCGTGCACACGGTGCCCTGGGACCAGCTCTTTCGGAACCCGCACCAAGC | |
| | TCTGCTCCACACTGCCAACCGGCCAGAGGACGAGTGTGTGGGCGAGGGCCTGGCCTGCC | |
| | ACCAGCTGTGCGCCCGAGGGCACTGCTGGGGTCCAGGGCCCACCCAGTGTGTCAACTGC | |
| | AGCCAGTTCCTTCGGGGCCAGGAGTGCGTGGAGGAATGCCGAGTACTGCAGGGGCTCCC | |
| | CAGGGAGTATGTGAATGCCAGGCACTGTTTGCCGTGCCACCCTGAGTGTCAGCCCCAGA | |
| | ATGGCTCAGTGACCTGTTTTGGACCGGAGGCTGACCAGTGTGTGGCCTGTGCCCACTAT | |
| | AAGGACCCTCCCTTCTGCGTGGCCCGCTGCCCCAGCGGTGTGAAACCTGACCTCTCCTA | |
| | CATGCCCATCTGGAAGTTTCCAGATGAGGAGGGCGCATGCCAGCCTTGCCCCATCAACT | |
| | GCACCCACTCCTGTGTGGACCTGGATGACAAGGGCTGCCCCGCCGAGCAGAGAGCCAGC | |
| | CCTCTGACGTCCATCATCTCTGCGGTGGTTGGCATTCTGCTGGTCGTGGTCTTGGGGGT | |
| | GGTCTTTGGGATCCTCATCAAGCGACGGCAGCAGAAGATCCGGAAGTACACGATGCGGA | |
| | GACTGCTGCAGGAAACGGAGCTGGTGGAGCCGCTGACACCTAGCGGAGCGATGCCCAAC | |
| | CAGGCGCAGATGCGGATCCTGAAAGAGACGGAGCTGAGGAAGGTGAAGGTGCTTGGATC | |
| | TGGCGCTTTTGGCACAGTCTACAAGGGCATCTGGATCCCTGATGGGGAGAATGTGAAAA | |
| | TTCCAGTGGCCATCAAAGTGTTGAGGGAAAACACATCCCCCAAAGCCAACAAAGAAATC | |
| | TTAGACGAAGCATACGTGATGGCTGGTGTGGGCTCCCCATATGTCTCCCGCCTTCTGGG | |
| | CATCTGCCTGACATCCACGGTGCAGCTGGTGACACAGCTTATGCCCTATGGCTGCCTCT | |
| | TAGACCATGTCCGGGAAAACCGCGGACGCCTGGGCTCCCAGGACCTGCTGAACTGGTGT | |
| | ATGCAGATTGCCAAGGGGATGAGCTACCTGGAGGATGTGCGGCTCGTACACAGGGACTT | |
| | GGCCGCTCGGAACGTGCTGGTCAAGAGTCCCAACCATGTCAAAATTACAGACTTCGGGC | |
| | TGGCTCGGCTGCTGGACATTGACGAGACAGAGTACCATGCAGATGGGGGCAAGGTGCCC | |
| | ATCAAGTGGATGGCGCTGGAGTCCATTCTCCGCCGGCGGTTCACCCACCAGAGTGATGT | |
| | GTGGAGTTATGGTGTGACTGTGTGGGAGCTGATGACTTTTGGGGCCAAACCTTACGATG | |
| | GGATCCCAGCCCGGGAGATCCCTGACCTGCTGGAAAAGGGGGAGCGGCTGCCCCAGCCC | |
| | CCCATCTGCACCATTGATGTCTACATGATCATGGTCAAATGTTGGATGATTGACTCTGA | |
| | ATGTCGGCCAAGATTCCGGGAGTTGGTGTCTGAATTCTCCCGCATGGCCAGGGACCCCC | |
| | AGCGCTTTGTGGTCATCCAGAATGAGGACTTGGGCCCAGCCAGTCCCTTGGACAGCACC | |
| | TTCTACCGCTCACTGCTGGAGGACGATGACATGGGGGACCTGGTGGATGCTGAGGAGTA | |
| | TCTGGTACCCCAGCAGGGCTTCTTCTGTCCAGACCCTGCCCCGGGCGCTGGGGGCATGG | |
| | TCCACCACAGGCACCGCAGCTCATCTACCAGGAGTGGCGGTGGGGACCTGACACTAGGG | |
| | CTGGAGCCCTCTGAAGAGGAGGCCCCCAGGTCTCCACTGGCACCCTCCGAAGGGGCTGG | |
| | CTCCGATGTATTTGATGGTGACCTGGGAATGGGGGCAGCCAAGGGGCTGCAAAGCCTCC | |
| | CCACACATGACCCCAGCCCTCTACAGCGGTACAGTGAGGACCCCACAGTACCCCTGCCC | |
| | TCTGAGACTGATGGCTACGTTGCCCCCCTGACCTGCAGCCCCCAGCCTGAATATGTGAA | |
| | CCAGCCAGATGTTCGGCCCCAGCCCCCTTCGCCCCGAGAGGGCCCTCTGCCTGCTGCCC | |
| | GACCTGCTGGTGCCACTCTGGAAAGGCCCAAGACTCTCTCCCCAGGGAAGAATGGGGTC | |
| | GTCAAAGACGTTTTTGCCTTTGGGGGTGCCGTGGAGAACCCCGAGTACTTGACACCCCA | |
| | GGGAGGAGCTGCCCCTCAGCCCCACCCTCCTCCTGCCTTCAGCCCAGCCTTCGACAACC | |
| | TCTATTACTGGGACCAGGACCCACCAGAGCGGGGGGCTCCACCCAGCACCTTCAAAGGG | |
| | ACACCTACGGCAGAGAACCCAGAGTACCTGGGTCTGGACGTGCCAGTG | |
| Human HER2 | MELAALCRWGLLLALLPPGAASTQVCTGTDMKLRLPASPETHLDMLRHLYQGCQVVGN | 567 |
| protein | LELTYLPTNASLSFLQDIQEVQGYVLIAHNQVRQVPLQRLRIVRGTQLFEDNYALAVLD | |
| sequence | NGDPLNNTTPVTGASPGGLRELQLRSLTEILKGGVLIQRNPQLCYQDTILWKDIFHKNN | |
| | QLALTLIDTNRSRACHPCSPMCKGSRCWGESSEDCQSLTRTVCAGGCARCKGPLPTDCC | |
| | HEQCAAGCTGPKHSDCLACLHFNHSGICELHCPALVTYNTDTFESMPNPEGRYTFGASC | |
| | VTACPYNYLSTDVGSCTLVCPLHNQEVTAEDGTQRCEKCSKPCARVCYGLGMEHLREVR | |
| | AVTSANIQEFAGCKKIFGSLAFLPESFDGDPASNTAPLQPEQLQVFETLEEITGYLYIS | |
| | AWPDSLPDLSVFQNLQVIRGRILHNGAYSLTLQGLGISWLGLRSLRELGSGLALIHHNT | |
| | HLCFVHTVPWDQLFRNPHQALLHTANRPEDECVGEGLACHQLCARGHCWGPGPTQCVNC | |
| | SQFLRGQECVEECRVLQGLPREYVNARHCLPCHPECQPQNGSVTCFGPEADQCVACAHY | |
| | KDPPFCVARCPSGVKPDLSYMPIWKFPDEEGACQPCPINCTHSCVDLDDKGCPAEQRAS | |
| | PLTSIISAVVGILLVVVLGVVFGILIKRRQQKIRKYTMRRLLQETELVEPLTPSGAMPN | |
| | QAQMRILKETELRKVKVLGSGAFGTVYKGIWIPDGENVKIPVAIKVLRENTSPKANKEI | |
| | LDEAYVMAGVGSPYYSRLLGICLTSTVQLVTQLMPYGCLLDHVRENRGRLGSQDLLNWC | |
| | MQIAKGMSYLEDVRLVHRDLAARNVLVKSPNHVKITDFGLARLLDIDETEYHADGGKVP | |
| | IKWMALESILRRRFTHQSDVWSYGVTVWELMTFGAKPYDGIPAREIPDLLEKGERLPQP | |
| | PICTIDVYMIMVKCWMIDSECRPRFRELVSEFSRMARDPQRFVVIQNEDLGPASPLDST | |
| | FYRSLLEDDDMGDLVDAEEYLVPQQGFFCPDPAPGAGGMVHHRHRSSSTRSGGGDLTLG | |
| | LEPSEEEAPRSPLAPSEGAGSDVFDGDLGMGAAKGLQSLPTHDPSPLQRYSEDPTVPLP | |
| | SETDGYVAPLTCSPQPEYVNQPDVRPQPPSPREGPLPAARPAGATLERPKTLSPGKNGV | |
| | VKDVFAFGGAVENPEYLTPQGGAAPQPHPPPAFSPAFDNLYYWDQDPPERGAPPSTFKG | |
| | TPTAENPEYLGLDVPV | |

[0365] The mouse large intestine-derived CT26 cancer cells were transfected with the pCMV6-AC-hHER2 human HER2 expression vector using the lipofectamine 2000 transfection reagent (Invitrogen, 11668-019). Only cells transfected with the pCMV6-AC-hHER2 human HER2 expression vector were selected by incubating the transfected cells in culture medium containing 1 mg/mL G418 (Invivogen, ant-gn-5) for 14 days. The top 3% clones in terms of HER2 expression was sorted into a 96-well plate (ThermoFisher, 167008) with 1 cell per well using SH800S Cell Sorter (SONY). Selection was performed by incubation in G418-containing medium for 21 days, and a total of 8 CT26 mouse large intestine cancer cell line clones expressing human HER2 were obtained, and human HER2 expression in these cells was monitored by flow cytometer (BD Biosciences, FACSverse) analysis after staining with the anti-human HER2-BV421 (BD, 744811) (FIG. 37, Table 41).

TABLE 41
ΔGMFI (of unstained control)

| | |
|---|---|
| #1-24 | 27.3 |
| #1-66 | 3.7 |
| #2-50 | 19.1 |
| #2-60 | 25.9 |
| #2-78 | 7.5 |
| #2-91 | 17.5 |
| #4-14 | 26.8 |
| #4-46 | 6.5 |

[0366] Alter subculturing six times tor 20 days in a (G418-free environment, the cells were stained with the anti-human HER2-BV421 (BD, 744811), and the level of human HER2 expression was measured. It was shown that the level of human HER2 expression was not reduced in cells grown without G418 compared to cells grown with G418 (FIG. 38, Table 42).

TABLE 42
ΔGMFI (of unstained control)

| | |
|---|---|
| #1-24 | 27.3 |
| #1-66 | 3.7 |
| #2-50 | 19.1 |
| #2-60 | 25.9 |
| #2-78 | 7.5 |
| #2-91 | 17.5 |
| #4-14 | 26.8 |
| #4-46 | 6.5 |

[0367] To compare the cell surface Fc loads among the parental CT26, CT26-HER2 cell line (Clone #2-60) and human cancer cell lines (SNU5, SNU601, and NCI-N87), each cell was allowed to bind to 100 nM human IgG1 (Bio X cell, BE0297), 100 nM trastuzumab (TRA), and 100 nM H01 antibody at 4° C. for 30 minutes in a 96-well v-bottom plate (Corning, 3363). Thereafter, they were treated with the Alexa 488 fluorescence-conjugated anti-human IgG Fcγ Fab antibody (Jackson ImmunoResearch, 109-547-008), and the Fc loads on the cells were quantified using a flow cytometer (FIG. 39, Table 43). CT26-HER2 cell line (Clone #2-60) was shown to express human HER2 at a level similar to that of SNU5 (FIG. 39, Table 43). In addition, it was shown that in the CT26-HER2 cell line, treatment of 100 nM H01 results in increased Fc loads on the cell surface compared to that of 100 nM trastuzumab (TRA).

TABLE 43

| | | CT26-HER2 | | | |
|---|---|---|---|---|---|
| GMFI | CT26 | (#2-60) | SNU5 | SNU601 | NCI-N87 |
| 2nd only | 99 | 102 | 94 | 97 | 116 |
| 100 nM IgG1 | 176 | 150 | 101 | 173 | 132 |
| isotype | | | | | |
| 100 nM | 252 | 959 | 991 | 1642 | 162433 |
| Trastuzumab | | | | | |
| 100 nM H01 | 147 | 1907 | 2028 | 3703 | 243897 |

[0368] Efficacy in the CT26-HER2 (Clone #2-60) syngeneic mouse model was evaluated using 6-week-old female Balb/c mice (ORIENT BIO INC.). PBS (vehicle), 5 mg/kg trastuzumab, and 5 mg/kg H01 were administered intraperitoneally (I.P.) twice a week for a total of 2 weeks (FIG. 40). The analysis showed that H01 induces superior antitumor activity compared to trastuzumab (FIG. 40).

### Example 17. Design, Preparation and Analysis of Novel Antibody Targeting Glypican-3 (GPC3)

[0369] The variant light chain and heavy chain polypeptide sequences of the antibodies that specifically recognize the glypican-3 (GPC-3) protein are shown in Table 44. For GPM01, expression vectors consisting of the sequences corresponding to Fc-Hole (SEQ ID NO: 7), GPM01 HC (SEQ ID NO: 67), and GPM01 LC (SEQ ID NO: 68) were co-transfected into EXPICHO-S™ (Gibco, A29127) (FIG. 41a, Table 44), and purification and analysis were performed in the same manner as described in Example 1. Expression, purification and analysis were performed for GPM02, GPM04, GPB01, GPB03, GPB04, and GPB06 in the same manner as mentioned above (FIGS. 41a to 41b, Table 44). GPM01, GPM02, and GPM04 bind monovalently to different epitopes of the antigen and have structures consisting of two Fc domains (FIG. 41a). GPB01, GPB03, GPB04, and GPB06 have structures in which the variable regions of GPM01, GPM02, and GPM04 are linked with a polypeptide linker (SEQ ID NO: 48, SEQ ID NO: 50), and bind biparatopically to GPC-3, and have two Fc domains (FIG. 41b).

TABLE 44

| Name | Sequence | SEQ ID NO |
|---|---|---|
| GPM01 HC | EVQLVESGGGLVKPGGSLKLSCAASGFTFSRYAMSWVRQIPEKCLE | 67 |
| | WVAAIDSSGGDTYYLDTVKDRFTISRDNANNTLHLQMRSLRSEDTA | |
| | LYYCVRQGGAYWGQGTLVTVSSASTKGPSVFPLAPSSKSTSGGTAAL | |
| | GCLVKDYFPEPVTVSWNSGALTSGVHTFPAVLQSSGLYSLSSVVTVP | |
| | SSSLGTQTYICNVNHKPSNTKVDKKVEPKSCDKTHTCPPCPAPELLG | |
| | GPSVFLFPPKPKDTLMISRTPEVTCVVVDVSHEDPEVKFNWYVDGVE | |
| | VHNAKTKPREEQYNSTYRVVSVLTVLHQDWLNGKEYKCKVSNKAL | |
| | PAPIEKTISKAKGQPREPQVYTLPPCREEMTKNQVSLWCLVKGFYPS | |
| | DIAVEWESNGQPENNYKTTPPVLDSDGSFFLYSKLTVDKSRWQQGN | |
| | VFSCSVMHEALHNHYTQKSLSLSPGK | |
| GPM01 LC | DVVMTQTPLTLSVTIGQPASISCKSSQSLLDSDGKTYLNWLLQRPGQS | 68 |
| | PKRLIYLVSKLDSGAPDRFTGSGSGTDFTLKISRVEAEDLGIYYCWQG | |
| | THFPLTFGCGTKLEIKRTVAAPSVFIFPPSDEQLKSGTASVVCLLNNFY | |
| | PREAKVQWKVDNALQSGNSQESVTEQDSKDSTYSLSSTLTLSKADY | |
| | EKHKVYACEVTHQGLSSPVTKSFNRGECGGGGSGGGGSGGGGSEPK | |
| | SSDKTHTCPPCPAPELLGGPSVFLFPPKPKDTLMISRTPEVTCVVVDVS | |
| | HEDPEVKFNWYVDGVEVHNAKTKPREEQYNSTYRVVSVLTVLHQD | |
| | WLNGKEYKCKVSNKALPAPIEKTISKAKGQPREPQVYTLPPCREEMT | |
| | KNQVSLWCLVKGFYPSDIAVEWESNGQPENNYKTTPPVLDSDGSFFL | |
| | YSKLTVDKSRWQQGNVFSCSVMHEALHNHYTQKSLSLSPGK | |
| GPM02 HC | QVQLVQSGAEVKKPGASVKVSCKASGYTFTDYEMHWVRQAPGQCL | 69 |
| | EWMGALDPKTGDTAYSQKFKGRVTLTADKSTSTAYMELSSLTSEDT | |
| | AVYYCTRFYSYTYWGQGTLVTVSSASTKGPSVFPLAPSSKSTSGGTA | |
| | ALGCLVKDYFPEPVTVSWNSGALTSGVHTFPAVLQSSGLYSLSSVVT | |
| | VPSSSLGTQTYICNVNHKPSNTKVDKKVEPKSCDKTHTCPPCPAPELL | |
| | GGPSVFLFPPKPKDTLMISRTPEVTCVVVDVSHEDPEVKFNWYVDGV | |
| | EVHNAKTKPREEQYNSTYRVVSVLTVLHQDWLNGKEYKCKVSNKA | |
| | LPAPIEKTISKAKGQPREPQVYTLPPCREEMTKNQVSLWCLVKGFYPS | |
| | DIAVEWESNGQPENNYKTTPPVLDSDGSFFLYSKLTVDKSRWQQGN | |
| | VFSCSVMHEALHNHYTQKSLSLSPGK | |
| GPM02 LC | DVVMTQSPLSLPVTPGEPASISCRSSQSLVHSNRNTYLHWYLQKPGQ | 70 |
| | SPQLLIYKVSNRFSGVPDRFSGSGSGTDFTLKISRVEAEDVGVYYCSQ | |
| | NTHVPPTFGCGTKLEIKRTVAAPSVFIFPPSDEQLKSGTASVVCLLNNF | |
| | YPREAKVQWKVDNALQSGNSQESVTEQDSKDSTYSLSSTLTLSKAD | |
| | YEKHKVYACEVTHQGLSSPVTKSFNRGECGGGGSGGGGSGGGGSEP | |
| | KSSDKTHTCPPCPAPELLGGPSVFLFPPKPKDTLMISRTPEVTCVVVD | |
| | VSHEDPEVKFNWYVDGVEVHNAKTKPREEQYNSTYRVVSVLTVLH | |
| | QDWLNGKEYKCKVSNKALPAPIEKTISKAKGQPREPQVYTLPPCREE | |
| | MTKNQVSLWCLVKGFYPSDIAVEWESNGQPENNYKTTPPVLDSDGS | |
| | FFLYSKLTVDKSRWQQGNVFSCSVMHEALHNHYTQKSLSLSPGK | |
| GPM04 HC | EVQLVETGGGLVQPKGSLKLSCAASGFTFNASAMNWVRQAPGKCLE | 71 |
| | WVARIRSKSNNYAIYYADSVKDRFTISRDDSQSMLYLQMNNLKTED | |
| | TAMYYCVRDPGYYGNPWFAYWGQGTLVTVSSASTKGPSVFPLAPSS | |
| | KSTSGGTAALGCLVKDYFPEPVTVSWNSGALTSGVHTFPAVLQSSGL | |
| | YSLSSVVTVPSSSLGTQTYICNVNHKPSNTKVDKKVEPKSCDKTHTC | |
| | PPCPAPELLGGPSVFLFPPKPKDTLMISRTPEVTCVVVDVSHEDPEVK | |
| | FNWYVDGVEVHNAKTKPREEQYNSTYRVVSVLTVLHQDWLNGKEY | |
| | KCKVSNKALPAPIEKTISKAKGQPREPQVYTLPPCREEMTKNQVSLW | |
| | CLVKGFYPSDIAVEWESNGQPENNYKTTPPVLDSDGSFFLYSKLTVD | |
| | KSRWQQGNVFSCSVMHEALHNHYTQKSLSLSPGK | |
| GPM04 LC | QIVLTQSPAIMSAFPGEKVTMTCSASSSVSYMYWYQQKSGSSPRLLIY | 72 |
| | DTSNLASGVPVRFSGSGSGTSYSLTISRMEAEDAATYYCQQWSSYPL | |
| | TFGCGTKLEIKRTVAAPSVFIFPPSDEQLKSGTASVVCLLNNFYPREA | |
| | KVQWKVDNALQSGNSQESVTEQDSKDSTYSLSSTLTLSKADYEKHK | |
| | VYACEVTHQGLSSPVTKSFNRGECGGGGSGGGGSGGGGSEPKSSDK | |
| | THTCPPCPAPELLGGPSVFLFPPKPKDTLMISRTPEVTCVVVDVSHED | |
| | PEVKFNWYVDGVEVHNAKTKPREEQYNSTYRVVSVLTVLHQDWLN | |
| | GKEYKCKVSNKALPAPIEKTISKAKGQPREPQVYTLPPCREEMTKNQ | |
| | VSLWCLVKGFYPSDIAVEWESNGQPENNYKTTPPVLDSDGSFFLYSK | |
| | LTVDKSRWQQGNVFSCSVMHEALHNHYTQKSLSLSPGK | |
| GPB01 HC | QVQLVQSGAEVKKPGASVKVSCKASGYTFTDYEMHWVRQAPGQGL | 73 |
| | EWMGALDPKTGDTAYSQKFKGRVTLTADKSTSTAYMELSSLTSEDT | |
| | AVYYCTRFYSYTYWGQGTLVTVSSASTKGPSVFPLAPEVQLVESGG | |
| | GLVKPGGSLKLSCAASGFTFSRYAMSWVRQIPEKCLEWVAAIDSSGG | |
| | DTYYLDTVKDRFTISRDNANNTLHLQMRSLRSEDTALYYCVRQGGA | |
| | YWGQGTLVTVSSASTKGPSVFPLAPSSKSTSGGTAALGCLVKDYFPE | |
| | PVTVSWNSGALTSGVHTFPAVLQSSGLYSLSSVVTVPSSSLGTQTYIC | |
| | NVNHKPSNTKVDKKVEPKSCDKTHTCPPCPAPELLGGPSVFLFPPKP | |
| | KDTLMISRTPEVTCVVVDVSHEDPEVKFNWYVDGVEVHNAKTKPRE | |
| | EQYNSTYRVVSVLTVLHQDWLNGKEYKCKVSNKALPAPIEKTISKA | |
| | KGQPREPQVYTLPPCREEMTKNQVSLWCLVKGFYPSDIAVEWESNG | |
| | QPENNYKTTPPVLDSDGSFFLYSKLTVDKSRWQQGNVFSCSVMHEA | |
| | LHNHYTQKSLSLSPGK | |
| GPB01 LC | DVVMTQSPLSLPVTPGEPASISCRSSQSLVHSNRNTYLHWYLQKPGQ | 74 |
| | SPQLLIYKVSNRFSGVPDRFSGSGSGTDFTLKISRVEAEDVGVYYCSQ | |
| | NTHVPPTFGQGTKLEIKRTVAAPSVFIFPPDVVMTQTPLTLSVTIGQPA | |
| | SISCKSSQSLLDSDGKTYLNWLLQRPGQSPKRLIYLVSKLDSGAPDRF | |
| | TGSGSGTDFTLKISRVEAEDLGIYYCWQGTHFPLTFGCGTKLEIKRTV | |
| | AAPSVFIFPPSDEQLKSGTASVVCLLNNFYPREAKVQWKVDNALQSG | |
| | NSQESVTEQDSKDSTYSLSSTLTLSKADYEKHKVYACEVTHQGLSSP | |
| | VTKSFNRGECGGGGSGGGGSGGGGSEPKSSDKTHTCPPCPAPELLGG | |
| | PSVFLFPPKPKDTLMISRTPEVTCVVVDVSHEDPEVKFNWYVDGVEV | |
| | HNAKTKPREEQYNSTYRVVSVLTVLHQDWLNGKEYKCKVSNKALP | |
| | APIEKTISKAKGQPREPQVYTLPPCREEMTKNQVSLWCLVKGFYPSDI | |
| | AVEWESNGQPENNYKTTPPVLDSDGSFFLYSKLTVDKSRWQQGNVF | |
| | SCSVMHEALHNHYTQKSLSLSPGK | |
| GPB03 HC | QVQLVQSGAEVKKPGASVKVSCKASGYTFTDYEMHWVRQAPGQGL | 75 |
| | EWMGALDPKTGDTAYSQKFKGRVTLTADKSTSTAYMELSSLTSEDT | |
| | AVYYCTRFYSYTYWGQGTLVTVSSASTKGPSVFPLAPEVQLVETGG | |
| | GLVQPKGSLKLSCAASGFTFNASAMNWVRQAPGKCLEWVARIRSKS | |
| | NNYAIYYADSVKDRFTISRDDSQSMLYLQMNNLKTEDTAMYYCVR | |
| | DPGYYGNPWFAYWGQGTLVTVSSASTKGPSVFPLAPSSKSTSGGTA | |
| | ALGCLVKDYFPEPVTVSWNSGALTSGVHTFPAVLQSSGLYSLSSVVT | |
| | VPSSSLGTQTYICNVNHKPSNTKVDKKVEPKSCDKTHTCPPCPAPELL | |
| | GGPSVFLFPPKPKDTLMISRTPEVTCVVVDVSHEDPEVKFNWYVDGV | |
| | EVHNAKTKPREEQYNSTYRVVSVLTVLHQDWLNGKEYKCKVSNKA | |
| | LPAPIEKTISKAKGQPREPQVYTLPPCREEMTKNQVSLWCLVKGFYPS | |
| | DIAVEWESNGQPENNYKTTPPVLDSDGSFFLYSKLTVDKSRWQQGN | |
| | VFSCSVMHEALHNHYTQKSLSLSPGK | |
| GPB03 LC | DVVMTQSPLSLPVTPGEPASISCRSSQSLVHSNRNTYLHWYLQKPGQ | 76 |
| | SPQLLIYKVSNRFSGVPDRFSGSGSGTDFTLKISRVEAEDVGVYYCSQ | |
| | NTHVPPTFGQGTKLEIKRTVAAPSVFIFPPQIVLTQSPAIMSAFPGEKV | |
| | TMTCSASSSVSYMYWYQQKSGSSPRLLIYDTSNLASGVPVRFSGSGS | |
| | GTSYSLTISRMEAEDAATYYCQQWSSYPLTFGCGTKLEIKRTVAAPS | |
| | VFIFPPSDEQLKSGTASVVCLLNNFYPREAKVQWKVDNALQSGNSQE | |
| | SVTEQDSKDSTYSLSSTLTLSKADYEKHKVYACEVTHQGLSSPVTKS | |
| | FNRGECGGGGSGGGGSGGGGSEPKSSDKTHTCPPCPAPELLGGPSVF | |
| | LFPPKPKDTLMISRTPEVTCVVVDVSHEDPEVKFNWYVDGVEVHNA | |
| | KTKPREEQYNSTYRVVSVLTVLHQDWLNGKEYKCKVSNKALPAPIE | |
| | KTISKAKGQPREPQVYTLPPCREEMTKNQVSLWCLVKGFYPSDIAVE | |
| | WESNGQPENNYKTTPPVLDSDGSFFLYSKLTVDKSRWQQGNVFSCS | |
| | VMHEALHNHYTQKSLSLSPGK | |
| GPB04 HC | EVQLVESGGGLVKPGGSLKLSCAASGFTFSRYAMSWVRQIPEKILEW | 77 |
| | VAAIDSSGGDTYYLDTVKDRFTISRDNANNTLHLQMRSLRSEDTALY | |
| | YCVRQGGAYWGQGTLVTVSSASTKGPSVFPLAPQVQLVQSGAEVKK | |
| | PGASVKVSCKASGYTFTDYEMHWVRQAPGQCLEWMGALDPKTGDT | |
| | AYSQKFKGRVTLTADKSTSTAYMELSSLTSEDTAVYYCTRFYSYTY | |
| | WGQGTLVTVSSASTKGPSVFPLAPSSKSTSGGTAALGCLVKDYFPEP | |
| | VTVSWNSGALTSGVHTFPAVLQSSGLYSLSSVVTVPSSSLGTQTYICN | |
| | VNHKPSNTKVDKKVEPKSCDKTHTCPPCPAPELLGGPSVFLFPPKPK | |
| | DTLMISRTPEVTCVVVDVSHEDPEVKFNWYVDGVEVHNAKTKPREE | |
| | QYNSTYRVVSVLTVLHQDWLNGKEYKCKVSNKALPAPIEKTISKAK | |
| | GQPREPQVYTLPPCREEMTKNQVSLWCLVKGFYPSDIAVEWESNGQ | |
| | PENNYKTTPPVLDSDGSFFLYSKLTVDKSRWQQGNVFSCSVMHEAL | |
| | HNHYTQKSLSLSPGK | |
| GPB04 LC | DVVMTQTPLTLSVTIGQPASISCKSSQSLLDSDGKTYLNWLLQRPGQS | 78 |
| | PKRLIYLVSKLDSGAPDRFTGSGSGTDFTLKISRVEAEDLGIYYCWQG | |
| | THFPLTFGAGTKLEIKRTVAAPSVFIFPPDVVMTQSPLSLPVTPGEPASI | |
| | SCRSSQSLVHSNRNTYLHWYLQKPGQSPQLLIYKVSNRFSGVPDRFS | |
| | GSGSGTDFTLKISRVEAEDVGVYYCSQNTHVPPTFGCGTKLEIKRTV | |
| | AAPSVFIFPPSDEQLKSGTASVVCLLNNFYPREAKVQWKVDNALQSG | |
| | NSQESVTEQDSKDSTYSLSSTLTLSKADYEKHKVYACEVTHQGLSSP | |
| | VTKSFNRGECGGGGSGGGGSGGGGSEPKSSDKTHTCPPCPAPELLGG | |
| | PSVFLFPPKPKDTLMISRTPEVTCVVVDVSHEDPEVKFNWYVDGVEV | |
| | HNAKTKPREEQYNSTYRVVSVLTVLHQDWLNGKEYKCKVSNKALP | |
| | APIEKTISKAKGQPREPQVYTLPPCREEMTKNQVSLWCLVKGFYPSDI | |
| | AVEWESNGQPENNYKTTPPVLDSDGSFFLYSKLTVDKSRWQQGNVF | |
| | SCSVMHEALHNHYTQKSLSLSPGK | |
| GPB06 HC | EVQLVETGGGLVQPKGSLKLSCAASGFTFNASAMNWVRQAPGKGLE | 79 |
| | WVARIRSKSNNYAIYYADSVKDRFTISRDDSQSMLYLQMNNLKTED | |
| | TAMYYCVRDPGYYGNPWFAYWGQGTLVTVSSASTKGPSVFPLAPQ | |
| | VQLVQSGAEVKKPGASVKVSCKASGYTFTDYEMHWVRQAPGQCLE | |
| | WMGALDPKTGDTAYSQKFKGRVTLTADKSTSTAYMELSSLTSEDTA | |
| | VYYCTRFYSYTYWGQGTLVTVSSASTKGPSVFPLAPSSKSTSGGTAA | |
| | LGCLVKDYFPEPVTVSWNSGALTSGVHTFPAVLQSSGLYSLSSVVTV | |
| | PSSSLGTQTYICNVNHKPSNTKVDKKVEPKSCDKTHTCPPCPAPELLG | |
| | GPSVFLFPPKPKDTLMISRTPEVTCVVVDVSHEDPEVKFNWYVDGVE | |
| | VHNAKTKPREEQYNSTYRVVSVLTVLHQDWLNGKEYKCKVSNKAL | |
| | PAPIEKTISKAKGQPREPQVYTLPPCREEMTKNQVSLWCLVKGFYPS | |
| | DIAVEWESNGQPENNYKTTPPVLDSDGSFFLYSKLTVDKSRWQQGN | |
| | VFSCSVMHEALHNHYTQKSLSLSPGK | |
| GPB06 LC | QIVLTQSPAIMSAFPGEKVTMTCSASSSVSYMYWYQQKSGSSPRLLIY | 80 |
| | DTSNLASGVPVRFSGSGSGTSYSLTISRMEAEDAATYYCQQWSSYPL | |
| | TFGGGTKLEIKRTVAAPSVFIFPPDVVMTQSPLSLPVTPGEPASISCRSS | |
| | QSLVHSNRNTYLHWYLQKPGQSPQLLIYKVSNRFSGVPDRFSGSGSG | |
| | TDFTLKISRVEAEDVGVYYCSQNTHVPPTFGCGTKLEIKRTVAAPSVF | |
| | IFPPSDEQLKSGTASVVCLLNNFYPREAKVQWKVDNALQSGNSQESV | |
| | TEQDSKDSTYSLSSTLTLSKADYEKHKVYACEVTHQGLSSPVTKSFN | |
| | RGECGGGGSGGGGSGGGGSEPKSSDKTHTCPPCPAPELLGGPSVFLFP | |
| | PKPKDTLMISRTPEVTCVVVDVSHEDPEVKFNWYVDGVEVHNAKTK | |
| | PREEQYNSTYRVVSVLTVLHQDWLNGKEYKCKVSNKALPAPIEKTIS | |
| | KAKGQPREPQVYTLPPCREEMTKNQVSLWCLVKGFYPSDIAVEWES | |
| | NGQPENNYKTTPPVLDSDGSFFLYSKLTVDKSRWQQGNVFSCSVMH | |
| | EALHNHYTQKSLSLSPGK | |

TABLE 45

| Name | Sequence | SEQ ID NO |
|---|---|---|
| GPM01 HC | GAAGTTCAGCTTGTCGAAAGTGGCGGAGGTCTTGTAAAGCCAGGA | 504 |
| | GGGTCCCTGAAGTTGAGTTGTGCTGCCTCTGGCTTCACCTTTTCAC | |
| | GGTATGCCATGTCCTGGGTTCGACAGATACCTGAGAAGTGTCTTG | |
| | AATGGGTGGCCGCAATAGACAGTAGCGGTGGTGACACCTATTACC | |
| | TCGACACAGTCAAAGACCGCTTTACTATCTCACGCGATAACGCCA | |
| | ACAATACCCTGCACTTGCAGATGCGATCACTTCGTTCAGAAGACA | |
| | CTGCTCTTTACTATTGTGTACGCCAAGGGGGAGCATACTGGGGTC | |
| | AGGGAACACTGGTTACCGTGTCTTCAGCTAGCACCAAAGGACCTA | |
| | GTGTTTTTCCTCTTGCCCCTTCCTCAAAGTCTACCTCTGGGGGGAC | |
| | AGCCGCTCTGGGCTGCCTGGTCAAGGATTATTTCCCAGAGCCTGT | |
| | CACTGTCAGTTGGAACTCTGGAGCCTTGACTTCTGGTGTTCATACA | |
| | TTTCCTGCTGTCCTTCAAAGCAGCGGCTTGTACTCATTGTCTTCTGT | |
| | TGTGACAGTACCCTCAAGCAGCCTCGGCACTCAGACATACATCTG | |
| | CAATGTCAACCACAAACCCTCAAATACAAAGGTAGATAAAAAAG | |
| | TCGAACCAAAGTCTTGTGACAAAACTCACACGTGCCCACCGTGCC | |
| | CAGCACCTGAACTCCTGGGGGGACCGTCAGTCTTCCTCTTCCCCCC | |
| | AAAACCCAAGGACACCCTCATGATCTCCCGGACCCCTGAGGTCAC | |
| | ATGCGTGGTGGTGGACGTGAGCCACGAAGACCCTGAGGTCAAGTT | |
| | CAACTGGTACGTGGACGGCGTGGAGGTGCATAATGCCAAGACAA | |
| | AGCCGCGGGAGGAGCAGTACAACAGCACGTACCGTGTGGTCAGC | |
| | GTCCTCACCGTCCTGCACCAGGACTGGCTGAATGGCAAGGAGTAC | |
| | AAGTGCAAGGTCTCCAACAAAGCCCTCCCAGCCCCCATCGAGAAA | |
| | ACCATCTCCAAAGCCAAAGGGCAGCCCCGAGAACCACAGGTGTA | |
| | CACCCTGCCCCCATGCCGGGAGGAGATGACCAAGAACCAGGTCA | |
| | GCCTGTGGTGCCTGGTCAAAGGCTTCTATCCCAGCGACATCGCCG | |
| | TGGAGTGGGAGAGCAATGGGCAGCCGGAGAACAACTACAAGACC | |
| | ACGCCTCCCGTGCTGGACTCCGACGGCTCCTTCTTCCTCTACAGCA | |
| | AGCTCACCGTGGACAAGAGCAGGTGGCAGCAGGGGAACGTCTTC | |
| | TCATGCTCCGTGATGCATGAGGCTCTGCACAACCACTACACGCAG | |
| | AAGAGCCTCTCCCTGTCTCCGGGTAAA | |
| GPM01 LC | GACGTGGTTATGACTCAGACTCCTCTGACTCTCTCCGTCACTATTG | 505 |
| | GTCAGCCCGCTTCCATATCATGTAAATCATCACAATCTCTTCTTGA | |
| | TAGCGATGGCAAGACTTATTTGAACTGGTTGTTGCAACGCCCAGG | |
| | TCAGAGCCCTAAGAGACTTATCTATTTGGTGAGCAAACTCGACAG | |
| | CGGTGCACCCGATCGTTTTACCGGAAGCGGCAGCGGCACCGATTT | |
| | CACACTGAAGATCAGTAGGGTCGAAGCTGAAGACCTGGGAATCT | |
| | ACTACTGCTGGCAAGGTACTCACTTTCCCCTGACTTTCGGCTGCGG | |
| | TACTAAACTTGAGATCAAACGTACGGTGGCAGCTCCCAGCGTTTT | |
| | TATCTTTCCCCCATCCGACGAGCAGCTCAAGAGTGGCACTGCCTCT | |
| | GTAGTTTGTTTGCTGAATAACTTCTATCCACGTGAAGCAAAAGTAC | |
| | AGTGGAAGGTCGATAATGCCCTTCAGAGCGGTAACAGCCAAGAA | |
| | AGTGTTACCGAGCAAGATTCCAAAGATTCCACTTACAGTCTGTCC | |
| | AGCACATTGACACTGAGTAAGGCTGATTACGAAAAACACAAGGT | |
| | GTACGCATGCGAGGTGACACACCAAGGTCTTTCATCTCCTGTAAC | |
| | TAAGAGCTTTAACCGGGGAGAATGTGGTGGTGGGGGCAGCGGGG | |
| | GCGGAGGTAGTGGAGGCGGCGGTAGTGAACCAAAGAGTAGTGAC | |
| | AAAACTCACACGTGCCCACCGTGCCCAGCACCTGAACTCCTGGGG | |
| | GGACCGTCAGTCTTCCTCTTCCCCCCAAAACCCAAGGACACCCTC | |
| | ATGATCTCCCGGACCCCTGAGGTCACATGCGTGGTGGTGGACGTG | |
| | AGCCACGAAGACCCTGAGGTCAAGTTCAACTGGTACGTGGACGGC | |
| | GTGGAGGTGCATAATGCCAAGACAAAGCCGCGGGAGGAGCAGTA | |
| | CAACAGCACGTACCGTGTGGTCAGCGTCCTCACCGTCCTGCACCA | |
| | GGACTGGCTGAATGGCAAGGAGTACAAGTGCAAGGTCTCCAACA | |
| | AAGCCCTCCCAGCCCCCATCGAGAAAACCATCTCCAAAGCCAAAG | |
| | GGCAGCCCCGAGAACCACAGGTGTACACCCTGCCCCCATGCCGGG | |
| | AGGAGATGACCAAGAACCAGGTCAGCCTGTGGTGCCTGGTCAAA | |
| | GGCTTCTATCCCAGCGACATCGCCGTGGAGTGGGAGAGCAATGGG | |
| | CAGCCGGAGAACAACTACAAGACCACGCCTCCCGTGCTGGACTCC | |
| | GACGGCTCCTTCTTCCTCTACAGCAAGCTCACCGTGGACAAGAGC | |
| | AGGTGGCAGCAGGGGAACGTCTTCTCATGCTCCGTGATGCATGAG | |
| | GCTCTGCACAACCACTACACGCAGAAGAGCCTCTCCCTGTCTCCG | |
| | GGTAAA | |
| GPM02 HC | CAGGTTCAGCTTGTGCAATCAGGCGCTGAAGTCAAAAAACCAGGA | 506 |
| | GCAAGCGTGAAAGTAAGCTGTAAGGCTTCCGGTTACACTTTCACC | |
| | GATTACGAAATGCACTGGGTACGCCAGGCTCCTGGACAATGTCTG | |
| | GAATGGATGGGCGCACTTGATCCAAAAACAGGTGACACTGCTTAC | |
| | AGTCAAAAATTCAAAGGTCGTGTCACTCTTACAGCAGATAAGTCC | |
| | ACCAGTACCGCTTATATGGAGCTTAGCTCCCTGACTTCCGAGGAC | |
| | ACCGCCGTGTATTATTGTACAAGATTCTACTCATATACTTACTGGG | |
| | GCCAAGGAACCCTGGTGACAGTGTCATCTGCTAGCACCAAAGGAC | |
| | CTAGTGTTTTTCCTCTTGCCCCTTCCTCAAAGTCTACCTCTGGGGG | |
| | GACAGCCGCTCTGGGCTGCCTGGTCAAGGATTATTTCCCAGAGCC | |
| | TGTCACTGTCAGTTGGAACTCTGGAGCCTTGACTTCTGGTGTTCAT | |
| | ACATTTCCTGCTGTCCTTCAAAGCAGCGGCTTGTACTCATTGTCTT | |
| | CTGTTGTGACAGTACCCTCAAGCAGCCTCGGCACTCAGACATACA | |
| | TCTGCAATGTCAACCACAAACCCTCAAATACAAAGGTAGATAAAA | |
| | AAGTCGAACCAAAGTCTTGTGACAAAACTCACACGTGCCCACCGT | |
| | GCCCAGCACCTGAACTCCTGGGGGGACCGTCAGTCTTCCTCTTCCC | |
| | CCCAAAACCCAAGGACACCCTCATGATCTCCCGGACCCCTGAGGT | |
| | CACATGCGTGGTGGTGGACGTGAGCCACGAAGACCCTGAGGTCA | |
| | AGTTCAACTGGTACGTGGACGGCGTGGAGGTGCATAATGCCAAGA | |
| | CAAAGCCGCGGGAGGAGCAGTACAACAGCACGTACCGTGTGGTC | |
| | AGCGTCCTCACCGTCCTGCACCAGGACTGGCTGAATGGCAAGGAG | |
| | TACAAGTGCAAGGTCTCCAACAAAGCCCTCCCAGCCCCCATCGAG | |
| | AAAACCATCTCCAAAGCCAAAGGGCAGCCCCGAGAACCACAGGT | |
| | GTACACCCTGCCCCCATGCCGGGAGGAGATGACCAAGAACCAGG | |
| | TCAGCCTGTGGTGCCTGGTCAAAGGCTTCTATCCCAGCGACATCG | |
| | CCGTGGAGTGGGAGAGCAATGGGCAGCCGGAGAACAACTACAAG | |
| | ACCACGCCTCCCGTGCTGGACTCCGACGGCTCCTTCTTCCTCTACA | |
| | GCAAGCTCACCGTGGACAAGAGCAGGTGGCAGCAGGGGAACGTC | |
| | TTCTCATGCTCCGTGATGCATGAGGCTCTGCACAACCACTACACG | |
| | CAGAAGAGCCTCTCCCTGTCTCCGGGTAAA | |
| GPM02 LC | GATGTTGTTATGACTCAGTCACCTCTCTCACTTCCTGTAACCCCTG | 507 |
| | GTGAACCAGCCTCTATAAGCTGCCGGTCAAGTCAAAGCCTGGTTC | |
| | ATAGCAACCGTAACACTTACCTTCACTGGTACTTGCAAAAACCTG | |
| | GTCAGTCCCCACAACTCTTGATCTACAAAGTCTCCAATCGCTTCTC | |
| | TGGAGTCCCTGACAGGTTTTCTGGTAGTGGATCAGGTACAGACTT | |
| | CACTTTGAAAATCAGCCGCGTTGAGGCCGAGGACGTGGGAGTGTA | |
| | TTATTGCTCTCAGAATACCCATGTACCCCCAACCTTTGGCTGTGGG | |
| | ACTAAACTCGAGATTAAACGTACGGTGGCAGCTCCCAGCGTTTTT | |
| | ATCTTTCCCCCATCCGACGAGCAGCTCAAGAGTGGCACTGCCTCT | |
| | GTAGTTTGTTTGCTGAATAACTTCTATCCACGTGAAGCAAAAGTAC | |
| | AGTGGAAGGTCGATAATGCCCTTCAGAGCGGTAACAGCCAAGAA | |
| | AGTGTTACCGAGCAAGATTCCAAAGATTCCACTTACAGTCTGTCC | |
| | AGCACATTGACACTGAGTAAGGCTGATTACGAAAAACACAAGGT | |
| | GTACGCATGCGAGGTGACACACCAAGGTCTTTCATCTCCTGTAAC | |
| | TAAGAGCTTTAACCGGGGAGAATGTGGTGGTGGGGGCAGCGGGG | |
| | GCGGAGGTAGTGGAGGCGGCGGTAGTGAACCAAAGAGTAGTGAC | |
| | AAAACTCACACGTGCCCACCGTGCCCAGCACCTGAACTCCTGGGG | |
| | GGACCGTCAGTCTTCCTCTTCCCCCCAAAACCCAAGGACACCCTC | |
| | ATGATCTCCCGGACCCCTGAGGTCACATGCGTGGTGGTGGACGTG | |
| | AGCCACGAAGACCCTGAGGTCAAGTTCAACTGGTACGTGGACGGC | |
| | GTGGAGGTGCATAATGCCAAGACAAAGCCGCGGGAGGAGCAGTA | |
| | CAACAGCACGTACCGTGTGGTCAGCGTCCTCACCGTCCTGCACCA | |
| | GGACTGGCTGAATGGCAAGGAGTACAAGTGCAAGGTCTCCAACA | |
| | AAGCCCTCCCAGCCCCCATCGAGAAAACCATCTCCAAAGCCAAAG | |
| | GGCAGCCCCGAGAACCACAGGTGTACACCCTGCCCCCATGCCGGG | |
| | AGGAGATGACCAAGAACCAGGTCAGCCTGTGGTGCCTGGTCAAA | |
| | GGCTTCTATCCCAGCGACATCGCCGTGGAGTGGGAGAGCAATGGG | |
| | CAGCCGGAGAACAACTACAAGACCACGCCTCCCGTGCTGGACTCC | |
| | GACGGCTCCTTCTTCCTCTACAGCAAGCTCACCGTGGACAAGAGC | |
| | AGGTGGCAGCAGGGGAACGTCTTCTCATGCTCCGTGATGCATGAG | |
| | GCTCTGCACAACCACTACACGCAGAAGAGCCTCTCCCTGTCTCCG | |
| | GGTAAA | |
| GPM04 HC | GAAGTGCAACTGGTCGAAACAGGCGGGGGACTGGTACAGCCCAA | 508 |
| | GGGATCTTTGAAACTTAGTTGTGCTGCTAGTGGGTTTACATTCAAT | |
| | GCCTCCGCAATGAACTGGGTAAGACAAGCTCCTGGCAAGTGCCTG | |
| | GAATGGGTGGCCCGTATTCGCTCTAAAAGTAATAACTACGCTATT | |
| | TATTACGCTGATTCTGTAAAGGATCGGTTTACAATAAGTCGGGAC | |
| | GACAGCCAATCCATGCTGTATCTCCAAATGAATAACCTGAAAACA | |
| | GAGGATACTGCCATGTACTATTGTGTGCGGGACCCAGGCTATTAC | |
| | GGGAATCCCTGGTTCGCCTATTGGGGACAGGGCACTCTGGTTACC | |
| | GTATCATCAGCTAGCACCAAAGGACCTAGTGTTTTTCCTCTTGCCC | |
| | CTTCCTCAAAGTCTACCTCTGGGGGGACAGCCGCTCTGGGCTGCC | |
| | TGGTCAAGGATTATTTCCCAGAGCCTGTCACTGTCAGTTGGAACTC | |
| | TGGAGCCTTGACTTCTGGTGTTCATACATTTCCTGCTGTCCTTCAA | |
| | AGCAGCGGCTTGTACTCATTGTCTTCTGTTGTGACAGTACCCTCAA | |
| | GCAGCCTCGGCACTCAGACATACATCTGCAATGTCAACCACAAAC | |
| | CCTCAAATACAAAGGTAGATAAAAAAGTCGAACCAAAGTCTTGTG | |
| | ACAAAACTCACACGTGCCCACCGTGCCCAGCACCTGAACTCCTGG | |
| | GGGGACCGTCAGTCTTCCTCTTCCCCCCAAAACCCAAGGACACCC | |
| | TCATGATCTCCCGGACCCCTGAGGTCACATGCGTGGTGGTGGACG | |
| | TGAGCCACGAAGACCCTGAGGTCAAGTTCAACTGGTACGTGGACG | |
| | GCGTGGAGGTGCATAATGCCAAGACAAAGCCGCGGGAGGAGCAG | |
| | TACAACAGCACGTACCGTGTGGTCAGCGTCCTCACCGTCCTGCAC | |
| | CAGGACTGGCTGAATGGCAAGGAGTACAAGTGCAAGGTCTCCAA | |
| | CAAAGCCCTCCCAGCCCCCATCGAGAAAACCATCTCCAAAGCCAA | |
| | AGGGCAGCCCCGAGAACCACAGGTGTACACCCTGCCCCCATGCCG | |
| | GGAGGAGATGACCAAGAACCAGGTCAGCCTGTGGTGCCTGGTCA | |
| | AAGGCTTCTATCCCAGCGACATCGCCGTGGAGTGGGAGAGCAATG | |
| | GGCAGCCGGAGAACAACTACAAGACCACGCCTCCCGTGCTGGACT | |
| | CCGACGGCTCCTTCTTCCTCTACAGCAAGCTCACCGTGGACAAGA | |
| | GCAGGTGGCAGCAGGGGAACGTCTTCTCATGCTCCGTGATGCATG | |
| | AGGCTCTGCACAACCACTACACGCAGAAGAGCCTCTCCCTGTCTC | |
| | CGGGTAAA | |
| GPM04 LC | CAAATTGTCCTCACCCAATCACCAGCTATAATGTCTGCTTTTCCCG | 509 |
| | GCGAGAAAGTAACCATGACTTGTAGCGCCTCTAGTAGCGTGTCAT | |
| | ATATGTATTGGTATCAACAAAAGAGCGGTAGTTCACCTCGACTCC | |
| | TTATCTACGACACAAGTAATCTCGCTAGTGGTGTCCCAGTCCGTTT | |
| | CTCCGGGAGCGGCAGCGGCACATCATACTCCCTGACCATCTCCAG | |
| | AATGGAGGCCGAGGACGCTGCCACATACTATTGTCAGCAGTGGAG | |
| | CTCATATCCTTTGACATTCGGTTGCGGTACTAAACTCGAAATCAAG | |
| | CGTACGGTGGCAGCTCCCAGCGTTTTTATCTTTCCCCCATCCGACG | |
| | AGCAGCTCAAGAGTGGCACTGCCTCTGTAGTTTGTTTGCTGAATA | |
| | ACTTCTATCCACGTGAAGCAAAAGTACAGTGGAAGGTCGATAATG | |
| | CCCTTCAGAGCGGTAACAGCCAAGAAAGTGTTACCGAGCAAGATT | |
| | CCAAAGATTCCACTTACAGTCTGTCCAGCACATTGACACTGAGTA | |
| | AGGCTGATTACGAAAAACACAAGGTGTACGCATGCGAGGTGACA | |
| | CACCAAGGTCTTTCATCTCCTGTAACTAAGAGCTTTAACCGGGGA | |
| | GAATGTGGTGGTGGGGGCAGCGGGGGCGGAGGTAGTGGAGGCGG | |
| | CGGTAGTGAACCAAAGAGTAGTGACAAAACTCACACGTGCCCAC | |
| | CGTGCCCAGCACCTGAACTCCTGGGGGGACCGTCAGTCTTCCTCTT | |
| | CCCCCCAAAACCCAAGGACACCCTCATGATCTCCCGGACCCCTGA | |
| | GGTCACATGCGTGGTGGTGGACGTGAGCCACGAAGACCCTGAGGT | |
| | CAAGTTCAACTGGTACGTGGACGGCGTGGAGGTGCATAATGCCAA | |
| | GACAAAGCCGCGGGAGGAGCAGTACAACAGCACGTACCGTGTGG | |
| | TCAGCGTCCTCACCGTCCTGCACCAGGACTGGCTGAATGGCAAGG | |
| | AGTACAAGTGCAAGGTCTCCAACAAAGCCCTCCCAGCCCCCATCG | |
| | AGAAAACCATCTCCAAAGCCAAAGGGCAGCCCCGAGAACCACAG | |
| | GTGTACACCCTGCCCCCATGCCGGGAGGAGATGACCAAGAACCA | |
| | GGTCAGCCTGTGGTGCCTGGTCAAAGGCTTCTATCCCAGCGACAT | |
| | CGCCGTGGAGTGGGAGAGCAATGGGCAGCCGGAGAACAACTACA | |
| | AGACCACGCCTCCCGTGCTGGACTCCGACGGCTCCTTCTTCCTCTA | |
| | CAGCAAGCTCACCGTGGACAAGAGCAGGTGGCAGCAGGGGAACG | |
| | TCTTCTCATGCTCCGTGATGCATGAGGCTCTGCACAACCACTACAC | |
| | GCAGAAGAGCCTCTCCCTGTCTCCGGGTAAA | |
| GPB01 HC | CAGGTTCAGCTTGTGCAATCAGGCGCTGAAGTCAAAAAACCAGGA | 510 |
| | GCAAGCGTGAAAGTAAGCTGTAAGGCTTCCGGTTACACTTTCACC | |
| | GATTACGAAATGCACTGGGTACGCCAGGCTCCTGGACAAGGCCTG | |
| | GAATGGATGGGCGCACTTGATCCAAAAACAGGTGACACTGCTTAC | |
| | AGTCAAAAATTCAAAGGTCGTGTCACTCTTACAGCAGATAAGTCC | |
| | ACCAGTACCGCTTATATGGAGCTTAGCTCCCTGACTTCCGAGGAC | |
| | ACCGCCGTGTATTATTGTACAAGATTCTACTCATATACTTACTGGG | |
| | GCCAAGGAACCCTGGTGACAGTGTCATCTGCTAGCACCAAAGGAC | |
| | CTAGTGTTTTTCCTCTTGCCCCTGAAGTTCAGCTTGTCGAAAGTGG | |
| | CGGAGGTCTTGTAAAGCCAGGAGGGTCCCTGAAGTTGAGTTGTGC | |
| | TGCCTCTGGCTTCACCTTTTCACGGTATGCCATGTCCTGGGTTCGA | |
| | CAGATACCTGAGAAGTGTCTTGAATGGGTGGCCGCAATAGACAGT | |
| | AGCGGTGGTGACACCTATTACCTCGACACAGTCAAAGACCGCTTT | |
| | ACTATCTCACGCGATAACGCCAACAATACCCTGCACTTGCAGATG | |
| | CGATCACTTCGTTCAGAAGACACTGCTCTTTACTATTGTGTACGCC | |
| | AAGGGGGAGCATACTGGGGTCAGGGAACACTGGTTACCGTGTCTT | |
| | CAGCTAGCACCAAAGGACCTAGTGTTTTTCCTCTTGCCCCTTCCTC | |
| | AAAGTCTACCTCTGGGGGGACAGCCGCTCTGGGCTGCCTGGTCAA | |
| | GGATTATTTCCCAGAGCCTGTCACTGTCAGTTGGAACTCTGGAGC | |
| | CTTGACTTCTGGTGTTCATACATTTCCTGCTGTCCTTCAAAGCAGC | |
| | GGCTTGTACTCATTGTCTTCTGTTGTGACAGTACCCTCAAGCAGCC | |
| | TCGGCACTCAGACATACATCTGCAATGTCAACCACAAACCCTCAA | |
| | ATACAAAGGTAGATAAAAAAGTCGAACCAAAGTCTTGTGACAAA | |
| | ACTCACACGTGCCCACCGTGCCCAGCACCTGAACTCCTGGGGGGA | |
| | CCGTCAGTCTTCCTCTTCCCCCCAAAACCCAAGGACACCCTCATGA | |
| | TCTCCCGGACCCCTGAGGTCACATGCGTGGTGGTGGACGTGAGCC | |
| | ACGAAGACCCTGAGGTCAAGTTCAACTGGTACGTGGACGGCGTGG | |
| | AGGTGCATAATGCCAAGACAAAGCCGCGGGAGGAGCAGTACAAC | |
| | AGCACGTACCGTGTGGTCAGCGTCCTCACCGTCCTGCACCAGGAC | |
| | TGGCTGAATGGCAAGGAGTACAAGTGCAAGGTCTCCAACAAAGC | |
| | CCTCCCAGCCCCCATCGAGAAAACCATCTCCAAAGCCAAAGGGCA | |
| | GCCCCGAGAACCACAGGTGTACACCCTGCCCCCATGCCGGGAGGA | |
| | GATGACCAAGAACCAGGTCAGCCTGTGGTGCCTGGTCAAAGGCTT | |
| | CTATCCCAGCGACATCGCCGTGGAGTGGGAGAGCAATGGGCAGC | |
| | CGGAGAACAACTACAAGACCACGCCTCCCGTGCTGGACTCCGACG | |
| | GCTCCTTCTTCCTCTACAGCAAGCTCACCGTGGACAAGAGCAGGT | |
| | GGCAGCAGGGGAACGTCTTCTCATGCTCCGTGATGCATGAGGCTC | |
| | TGCACAACCACTACACGCAGAAGAGCCTCTCCCTGTCTCCGGGTA | |
| | AA | |
| GPB01 LC | GATGTTGTTATGACTCAGTCACCTCTCTCACTTCCTGTAACCCCTG | 511 |
| | GTGAACCAGCCTCTATAAGCTGCCGGTCAAGTCAAAGCCTGGTTC | |
| | ATAGCAACCGTAACACTTACCTTCACTGGTACTTGCAAAAACCTG | |
| | GTCAGTCCCCACAACTCTTGATCTACAAAGTCTCCAATCGCTTCTC | |
| | TGGAGTCCCTGACAGGTTTTCTGGTAGTGGATCAGGTACAGACTT | |
| | CACTTTGAAAATCAGCCGCGTTGAGGCCGAGGACGTGGGAGTGTA | |
| | TTATTGCTCTCAGAATACCCATGTACCCCCAACCTTTGGCCAAGGG | |
| | ACTAAACTCGAGATTAAACGTACGGTGGCCGCTCCCTCCGTGTTC | |
| | ATCTTCCCACCCGACGTGGTTATGACTCAGACTCCTCTGACTCTCT | |
| | CCGTCACTATTGGTCAGCCCGCTTCCATATCATGTAAATCATCACA | |
| | ATCTCTTCTTGATAGCGATGGCAAGACTTATTTGAACTGGTTGTTG | |
| | CAACGCCCAGGTCAGAGCCCTAAGAGACTTATCTATTTGGTGAGC | |
| | AAACTCGACAGCGGTGCACCCGATCGTTTTACCGGAAGCGGCAGC | |
| | GGCACCGATTTCACACTGAAGATCAGTAGGGTCGAAGCTGAAGAC | |
| | CTGGGAATCTACTACTGCTGGCAAGGTACTCACTTTCCCCTGACTT | |
| | TCGGCTGCGGTACTAAACTTGAGATCAAACGTACGGTGGCAGCTC | |
| | CCAGCGTTTTTATCTTTCCCCCATCCGACGAGCAGCTCAAGAGTGG | |
| | CACTGCCTCTGTAGTTTGTTTGCTGAATAACTTCTATCCACGTGAA | |
| | GCAAAAGTACAGTGGAAGGTCGATAATGCCCTTCAGAGCGGTAA | |
| | CAGCCAAGAAAGTGTTACCGAGCAAGATTCCAAAGATTCCACTTA | |
| | CAGTCTGTCCAGCACATTGACACTGAGTAAGGCTGATTACGAAAA | |
| | ACACAAGGTGTACGCATGCGAGGTGACACACCAAGGTCTTTCATC | |
| | TCCTGTAACTAAGAGCTTTAACCGGGGAGAATGTGGTGGTGGGGG | |
| | CAGCGGGGGCGGAGGTAGTGGAGGCGGCGGTAGTGAACCAAAGA | |
| | GTAGTGACAAAACTCACACGTGCCCACCGTGCCCAGCACCTGAAC | |
| | TCCTGGGGGGACCGTCAGTCTTCCTCTTCCCCCCAAAACCCAAGG | |
| | ACACCCTCATGATCTCCCGGACCCCTGAGGTCACATGCGTGGTGG | |
| | TGGACGTGAGCCACGAAGACCCTGAGGTCAAGTTCAACTGGTACG | |
| | TGGACGGCGTGGAGGTGCATAATGCCAAGACAAAGCCGCGGGAG | |
| | GAGCAGTACAACAGCACGTACCGTGTGGTCAGCGTCCTCACCGTC | |
| | CTGCACCAGGACTGGCTGAATGGCAAGGAGTACAAGTGCAAGGT | |
| | CTCCAACAAAGCCCTCCCAGCCCCCATCGAGAAAACCATCTCCAA | |
| | AGCCAAAGGGCAGCCCCGAGAACCACAGGTGTACACCCTGCCCC | |
| | CATGCCGGGAGGAGATGACCAAGAACCAGGTCAGCCTGTGGTGC | |
| | CTGGTCAAAGGCTTCTATCCCAGCGACATCGCCGTGGAGTGGGAG | |
| | AGCAATGGGCAGCCGGAGAACAACTACAAGACCACGCCTCCCGT | |
| | GCTGGACTCCGACGGCTCCTTCTTCCTCTACAGCAAGCTCACCGTG | |
| | GACAAGAGCAGGTGGCAGCAGGGGAACGTCTTCTCATGCTCCGTG | |
| | ATGCATGAGGCTCTGCACAACCACTACACGCAGAAGAGCCTCTCC | |
| | CTGTCTCCGGGTAAA | |
| GPB03 HC | CAGGTTCAGCTTGTGCAATCAGGCGCTGAAGTCAAAAAACCAGGA | 512 |
| | GCAAGCGTGAAAGTAAGCTGTAAGGCTTCCGGTTACACTTTCACC | |
| | GATTACGAAATGCACTGGGTACGCCAGGCTCCTGGACAAGGCCTG | |
| | GAATGGATGGGCGCACTTGATCCAAAAACAGGTGACACTGCTTAC | |
| | AGTCAAAAATTCAAAGGTCGTGTCACTCTTACAGCAGATAAGTCC | |
| | ACCAGTACCGCTTATATGGAGCTTAGCTCCCTGACTTCCGAGGAC | |
| | ACCGCCGTGTATTATTGTACAAGATTCTACTCATATACTTACTGGG | |
| | GCCAAGGAACCCTGGTGACAGTGTCATCTGCTAGCACCAAAGGAC | |
| | CTAGTGTTTTTCCTCTTGCCCCTGAAGTGCAACTGGTCGAAACAGG | |
| | CGGGGGACTGGTACAGCCCAAGGGATCTTTGAAACTTAGTTGTGC | |
| | TGCTAGTGGGTTTACATTCAATGCCTCCGCAATGAACTGGGTAAG | |
| | ACAAGCTCCTGGCAAGTGCCTGGAATGGGTGGCCCGTATTCGCTC | |
| | TAAAAGTAATAACTACGCTATTTATTACGCTGATTCTGTAAAGGAT | |
| | CGGTTTACAATAAGTCGGGACGACAGCCAATCCATGCTGTATCTC | |
| | CAAATGAATAACCTGAAAACAGAGGATACTGCCATGTACTATTGT | |
| | GTGCGGGACCCAGGCTATTACGGGAATCCCTGGTTCGCCTATTGG | |
| | GGACAGGGCACTCTGGTTACCGTATCATCAGCTAGCACCAAAGGA | |
| | CCTAGTGTTTTTCCTCTTGCCCCTTCCTCAAAGTCTACCTCTGGGG | |
| | GGACAGCCGCTCTGGGCTGCCTGGTCAAGGATTATTTCCCAGAGC | |
| | CTGTCACTGTCAGTTGGAACTCTGGAGCCTTGACTTCTGGTGTTCA | |
| | TACATTTCCTGCTGTCCTTCAAAGCAGCGGCTTGTACTCATTGTCT | |
| | TCTGTTGTGACAGTACCCTCAAGCAGCCTCGGCACTCAGACATAC | |
| | ATCTGCAATGTCAACCACAAACCCTCAAATACAAAGGTAGATAAA | |
| | AAAGTCGAACCAAAGTCTTGTGACAAAACTCACACGTGCCCACCG | |
| | TGCCCAGCACCTGAACTCCTGGGGGGACCGTCAGTCTTCCTCTTCC | |
| | CCCCAAAACCCAAGGACACCCTCATGATCTCCCGGACCCCTGAGG | |
| | TCACATGCGTGGTGGTGGACGTGAGCCACGAAGACCCTGAGGTCA | |
| | AGTTCAACTGGTACGTGGACGGCGTGGAGGTGCATAATGCCAAGA | |
| | CAAAGCCGCGGGAGGAGCAGTACAACAGCACGTACCGTGTGGTC | |
| | AGCGTCCTCACCGTCCTGCACCAGGACTGGCTGAATGGCAAGGAG | |
| | TACAAGTGCAAGGTCTCCAACAAAGCCCTCCCAGCCCCCATCGAG | |
| | AAAACCATCTCCAAAGCCAAAGGGCAGCCCCGAGAACCACAGGT | |
| | GTACACCCTGCCCCCATGCCGGGAGGAGATGACCAAGAACCAGG | |
| | TCAGCCTGTGGTGCCTGGTCAAAGGCTTCTATCCCAGCGACATCG | |
| | CCGTGGAGTGGGAGAGCAATGGGCAGCCGGAGAACAACTACAAG | |
| | ACCACGCCTCCCGTGCTGGACTCCGACGGCTCCTTCTTCCTCTACA | |
| | GCAAGCTCACCGTGGACAAGAGCAGGTGGCAGCAGGGGAACGTC | |
| | TTCTCATGCTCCGTGATGCATGAGGCTCTGCACAACCACTACACG | |
| | CAGAAGAGCCTCTCCCTGTCTCCGGGTAAA | |
| GPB03 LC | GATGTTGTTATGACTCAGTCACCTCTCTCACTTCCTGTAACCCCTG | 513 |
| | GTGAACCAGCCTCTATAAGCTGCCGGTCAAGTCAAAGCCTGGTTC | |
| | ATAGCAACCGTAACACTTACCTTCACTGGTACTTGCAAAAACCTG | |
| | GTCAGTCCCCACAACTCTTGATCTACAAAGTCTCCAATCGCTTCTC | |
| | TGGAGTCCCTGACAGGTTTTCTGGTAGTGGATCAGGTACAGACTT | |
| | CACTTTGAAAATCAGCCGCGTTGAGGCCGAGGACGTGGGAGTGTA | |
| | TTATTGCTCTCAGAATACCCATGTACCCCCAACCTTTGGCCAAGGG | |
| | ACTAAACTCGAGATTAAACGTACGGTGGCCGCTCCCTCCGTGTTC | |
| | ATCTTCCCACCCCAAATTGTCCTCACCCAATCACCAGCTATAATGT | |
| | CTGCTTTTCCCGGCGAGAAAGTAACCATGACTTGTAGCGCCTCTA | |
| | GTAGCGTGTCATATATGTATTGGTATCAACAAAAGAGCGGTAGTT | |
| | CACCTCGACTCCTTATCTACGACACAAGTAATCTCGCTAGTGGTGT | |
| | CCCAGTCCGTTTCTCCGGGAGCGGCAGCGGCACATCATACTCCCT | |
| | GACCATCTCCAGAATGGAGGCCGAGGACGCTGCCACATACTATTG | |
| | TCAGCAGTGGAGCTCATATCCTTTGACATTCGGTTGCGGTACTAAA | |
| | CTCGAAATCAAGCGTACGGTGGCAGCTCCCAGCGTTTTTATCTTTC | |
| | CCCCATCCGACGAGCAGCTCAAGAGTGGCACTGCCTCTGTAGTTT | |
| | GTTTGCTGAATAACTTCTATCCACGTGAAGCAAAAGTACAGTGGA | |
| | AGGTCGATAATGCCCTTCAGAGCGGTAACAGCCAAGAAAGTGTTA | |
| | CCGAGCAAGATTCCAAAGATTCCACTTACAGTCTGTCCAGCACAT | |
| | TGACACTGAGTAAGGCTGATTACGAAAAACACAAGGTGTACGCAT | |
| | GCGAGGTGACACACCAAGGTCTTTCATCTCCTGTAACTAAGAGCT | |
| | TTAACCGGGGAGAATGTGGTGGTGGGGGCAGCGGGGGCGGAGGT | |
| | AGTGGAGGCGGCGGTAGTGAACCAAAGAGTAGTGACAAAACTCA | |
| | CACGTGCCCACCGTGCCCAGCACCTGAACTCCTGGGGGGACCGTC | |
| | AGTCTTCCTCTTCCCCCCAAAACCCAAGGACACCCTCATGATCTCC | |
| | CGGACCCCTGAGGTCACATGCGTGGTGGTGGACGTGAGCCACGAA | |
| | GACCCTGAGGTCAAGTTCAACTGGTACGTGGACGGCGTGGAGGTG | |
| | CATAATGCCAAGACAAAGCCGCGGGAGGAGCAGTACAACAGCAC | |
| | GTACCGTGTGGTCAGCGTCCTCACCGTCCTGCACCAGGACTGGCT | |
| | GAATGGCAAGGAGTACAAGTGCAAGGTCTCCAACAAAGCCCTCC | |
| | CAGCCCCCATCGAGAAAACCATCTCCAAAGCCAAAGGGCAGCCC | |
| | CGAGAACCACAGGTGTACACCCTGCCCCCATGCCGGGAGGAGAT | |
| | GACCAAGAACCAGGTCAGCCTGTGGTGCCTGGTCAAAGGCTTCTA | |
| | TCCCAGCGACATCGCCGTGGAGTGGGAGAGCAATGGGCAGCCGG | |
| | AGAACAACTACAAGACCACGCCTCCCGTGCTGGACTCCGACGGCT | |
| | CCTTCTTCCTCTACAGCAAGCTCACCGTGGACAAGAGCAGGTGGC | |
| | AGCAGGGGAACGTCTTCTCATGCTCCGTGATGCATGAGGCTCTGC | |
| | ACAACCACTACACGCAGAAGAGCCTCTCCCTGTCTCCGGGTAAA | |
| GPB04 HC | GAAGTTCAGCTTGTCGAAAGTGGCGGAGGTCTTGTAAAGCCAGGA | 514 |
| | GGGTCCCTGAAGTTGAGTTGTGCTGCCTCTGGCTTCACCTTTTCAC | |
| | GGTATGCCATGTCCTGGGTTCGACAGATACCTGAGAAGATTCTTG | |
| | AATGGGTGGCCGCAATAGACAGTAGCGGTGGTGACACCTATTACC | |
| | TCGACACAGTCAAAGACCGCTTTACTATCTCACGCGATAACGCCA | |
| | ACAATACCCTGCACTTGCAGATGCGATCACTTCGTTCAGAAGACA | |
| | CTGCTCTTTACTATTGTGTACGCCAAGGGGGAGCATACTGGGGTC | |
| | AGGGAACACTGGTTACCGTGTCTTCAGCTAGCACCAAAGGACCTA | |
| | GTGTTTTTCCTCTTGCCCCTCAGGTTCAGCTTGTGCAATCAGGCGC | |
| | TGAAGTCAAAAAACCAGGAGCAAGCGTGAAAGTAAGCTGTAAGG | |
| | CTTCCGGTTACACTTTCACCGATTACGAAATGCACTGGGTACGCC | |
| | AGGCTCCTGGACAATGTCTGGAATGGATGGGCGCACTTGATCCAA | |
| | AAACAGGTGACACTGCTTACAGTCAAAAATTCAAAGGTCGTGTCA | |
| | CTCTTACAGCAGATAAGTCCACCAGTACCGCTTATATGGAGCTTA | |
| | GCTCCCTGACTTCCGAGGACACCGCCGTGTATTATTGTACAAGATT | |
| | CTACTCATATACTTACTGGGGCCAAGGAACCCTGGTGACAGTGTC | |
| | ATCTGCTAGCACCAAAGGACCTAGTGTTTTTCCTCTTGCCCCTTCC | |
| | TCAAAGTCTACCTCTGGGGGGACAGCCGCTCTGGGCTGCCTGGTC | |
| | AAGGATTATTTCCCAGAGCCTGTCACTGTCAGTTGGAACTCTGGA | |
| | GCCTTGACTTCTGGTGTTCATACATTTCCTGCTGTCCTTCAAAGCA | |
| | GCGGCTTGTACTCATTGTCTTCTGTTGTGACAGTACCCTCAAGCAG | |
| | CCTCGGCACTCAGACATACATCTGCAATGTCAACCACAAACCCTC | |
| | AAATACAAAGGTAGATAAAAAAGTCGAACCAAAGTCTTGTGACA | |
| | AAACTCACACGTGCCCACCGTGCCCAGCACCTGAACTCCTGGGGG | |
| | GACCGTCAGTCTTCCTCTTCCCCCCAAAACCCAAGGACACCCTCAT | |
| | GATCTCCCGGACCCCTGAGGTCACATGCGTGGTGGTGGACGTGAG | |
| | CCACGAAGACCCTGAGGTCAAGTTCAACTGGTACGTGGACGGCGT | |
| | GGAGGTGCATAATGCCAAGACAAAGCCGCGGGAGGAGCAGTACA | |
| | ACAGCACGTACCGTGTGGTCAGCGTCCTCACCGTCCTGCACCAGG | |
| | ACTGGCTGAATGGCAAGGAGTACAAGTGCAAGGTCTCCAACAAA | |
| | GCCCTCCCAGCCCCCATCGAGAAAACCATCTCCAAAGCCAAAGGG | |
| | CAGCCCCGAGAACCACAGGTGTACACCCTGCCCCCATGCCGGGAG | |
| | GAGATGACCAAGAACCAGGTCAGCCTGTGGTGCCTGGTCAAAGG | |
| | CTTCTATCCCAGCGACATCGCCGTGGAGTGGGAGAGCAATGGGCA | |
| | GCCGGAGAACAACTACAAGACCACGCCTCCCGTGCTGGACTCCGA | |
| | CGGCTCCTTCTTCCTCTACAGCAAGCTCACCGTGGACAAGAGCAG | |
| | GTGGCAGCAGGGGAACGTCTTCTCATGCTCCGTGATGCATGAGGC | |
| | TCTGCACAACCACTACACGCAGAAGAGCCTCTCCCTGTCTCCGGG | |
| | TAAA | |
| GPB04 LC | GACGTGGTTATGACTCAGACTCCTCTGACTCTCTCCGTCACTATTG | 515 |
| | GTCAGCCCGCTTCCATATCATGTAAATCATCACAATCTCTTCTTGA | |
| | TAGCGATGGCAAGACTTATTTGAACTGGTTGTTGCAACGCCCAGG | |
| | TCAGAGCCCTAAGAGACTTATCTATTTGGTGAGCAAACTCGACAG | |
| | CGGTGCACCCGATCGTTTTACCGGAAGCGGCAGCGGCACCGATTT | |
| | CACACTGAAGATCAGTAGGGTCGAAGCTGAAGACCTGGGAATCT | |
| | ACTACTGCTGGCAAGGTACTCACTTTCCCCTGACTTTCGGCGCCGG | |
| | TACTAAACTTGAGATCAAACGTACGGTGGCAGCTCCCAGCGTTTT | |
| | TATCTTTCCCCCAGATGTTGTTATGACTCAGTCACCTCTCTCACTTC | |
| | CTGTAACCCCTGGTGAACCAGCCTCTATAAGCTGCCGGTCAAGTC | |
| | AAAGCCTGGTTCATAGCAACCGTAACACTTACCTTCACTGGTACTT | |
| | GCAAAAACCTGGTCAGTCCCCACAACTCTTGATCTACAAAGTCTC | |
| | CAATCGCTTCTCTGGAGTCCCTGACAGGTTTTCTGGTAGTGGATCA | |
| | GGTACAGACTTCACTTTGAAAATCAGCCGCGTTGAGGCCGAGGAC | |
| | GTGGGAGTGTATTATTGCTCTCAGAATACCCATGTACCCCCAACCT | |
| | TTGGCTGTGGGACTAAACTCGAGATTAAACGTACGGTGGCAGCTC | |
| | CCAGCGTTTTTATCTTTCCCCCATCCGACGAGCAGCTCAAGAGTGG | |
| | CACTGCCTCTGTAGTTTGTTTGCTGAATAACTTCTATCCACGTGAA | |
| | GCAAAAGTACAGTGGAAGGTCGATAATGCCCTTCAGAGCGGTAA | |
| | CAGCCAAGAAAGTGTTACCGAGCAAGATTCCAAAGATTCCACTTA | |
| | CAGTCTGTCCAGCACATTGACACTGAGTAAGGCTGATTACGAAAA | |
| | ACACAAGGTGTACGCATGCGAGGTGACACACCAAGGTCTTTCATC | |
| | TCCTGTAACTAAGAGCTTTAACCGGGGAGAATGTGGTGGTGGGGG | |
| | CAGCGGGGGCGGAGGTAGTGGAGGCGGCGGTAGTGAACCAAAGA | |
| | GTAGTGACAAAACTCACACGTGCCCACCGTGCCCAGCACCTGAAC | |
| | TCCTGGGGGGACCGTCAGTCTTCCTCTTCCCCCCAAAACCCAAGG | |
| | ACACCCTCATGATCTCCCGGACCCCTGAGGTCACATGCGTGGTGG | |
| | TGGACGTGAGCCACGAAGACCCTGAGGTCAAGTTCAACTGGTACG | |
| | TGGACGGCGTGGAGGTGCATAATGCCAAGACAAAGCCGCGGGAG | |
| | GAGCAGTACAACAGCACGTACCGTGTGGTCAGCGTCCTCACCGTC | |
| | CTGCACCAGGACTGGCTGAATGGCAAGGAGTACAAGTGCAAGGT | |
| | CTCCAACAAAGCCCTCCCAGCCCCCATCGAGAAAACCATCTCCAA | |
| | AGCCAAAGGGCAGCCCCGAGAACCACAGGTGTACACCCTGCCCC | |
| | CATGCCGGGAGGAGATGACCAAGAACCAGGTCAGCCTGTGGTGC | |
| | CTGGTCAAAGGCTTCTATCCCAGCGACATCGCCGTGGAGTGGGAG | |
| | AGCAATGGGCAGCCGGAGAACAACTACAAGACCACGCCTCCCGT | |
| | GCTGGACTCCGACGGCTCCTTCTTCCTCTACAGCAAGCTCACCGTG | |
| | GACAAGAGCAGGTGGCAGCAGGGGAACGTCTTCTCATGCTCCGTG | |
| | ATGCATGAGGCTCTGCACAACCACTACACGCAGAAGAGCCTCTCC | |
| | CTGTCTCCGGGTAAA | |
| GPB06 HC | GAAGTGCAACTGGTCGAAACAGGCGGGGGACTGGTACAGCCCAA | 516 |
| | GGGATCTTTGAAACTTAGTTGTGCTGCTAGTGGGTTTACATTCAAT | |
| | GCCTCCGCAATGAACTGGGTAAGACAAGCTCCTGGCAAGGGCCTG | |
| | GAATGGGTGGCCCGTATTCGCTCTAAAAGTAATAACTACGCTATT | |
| | TATTACGCTGATTCTGTAAAGGATCGGTTTACAATAAGTCGGGAC | |
| | GACAGCCAATCCATGCTGTATCTCCAAATGAATAACCTGAAAACA | |
| | GAGGATACTGCCATGTACTATTGTGTGCGGGACCCAGGCTATTAC | |
| | GGGAATCCCTGGTTCGCCTATTGGGGACAGGGCACTCTGGTTACC | |
| | GTATCATCAGCTAGCACCAAAGGACCTAGTGTTTTTCCTCTTGCCC | |
| | CTCAGGTTCAGCTTGTGCAATCAGGCGCTGAAGTCAAAAAACCAG | |
| | GAGCAAGCGTGAAAGTAAGCTGTAAGGCTTCCGGTTACACTTTCA | |
| | CCGATTACGAAATGCACTGGGTACGCCAGGCTCCTGGACAATGTC | |
| | TGGAATGGATGGGCGCACTTGATCCAAAAACAGGTGACACTGCTT | |
| | ACAGTCAAAAATTCAAAGGTCGTGTCACTCTTACAGCAGATAAGT | |
| | CCACCAGTACCGCTTATATGGAGCTTAGCTCCCTGACTTCCGAGG | |
| | ACACCGCCGTGTATTATTGTACAAGATTCTACTCATATACTTACTG | |
| | GGGCCAAGGAACCCTGGTGACAGTGTCATCTGCTAGCACCAAAGG | |
| | ACCTAGTGTTTTTCCTCTTGCCCCTTCCTCAAAGTCTACCTCTGGG | |
| | GGGACAGCCGCTCTGGGCTGCCTGGTCAAGGATTATTTCCCAGAG | |
| | CCTGTCACTGTCAGTTGGAACTCTGGAGCCTTGACTTCTGGTGTTC | |
| | ATACATTTCCTGCTGTCCTTCAAAGCAGCGGCTTGTACTCATTGTC | |
| | TTCTGTTGTGACAGTACCCTCAAGCAGCCTCGGCACTCAGACATA | |
| | CATCTGCAATGTCAACCACAAACCCTCAAATACAAAGGTAGATAA | |
| | AAAAGTCGAACCAAAGTCTTGTGACAAAACTCACACGTGCCCACC | |
| | GTGCCCAGCACCTGAACTCCTGGGGGGACCGTCAGTCTTCCTCTTC | |
| | CCCCCAAAACCCAAGGACACCCTCATGATCTCCCGGACCCCTGAG | |
| | GTCACATGCGTGGTGGTGGACGTGAGCCACGAAGACCCTGAGGTC | |
| | AAGTTCAACTGGTACGTGGACGGCGTGGAGGTGCATAATGCCAAG | |
| | ACAAAGCCGCGGGAGGAGCAGTACAACAGCACGTACCGTGTGGT | |
| | CAGCGTCCTCACCGTCCTGCACCAGGACTGGCTGAATGGCAAGGA | |
| | GTACAAGTGCAAGGTCTCCAACAAAGCCCTCCCAGCCCCCATCGA | |
| | GAAAACCATCTCCAAAGCCAAAGGGCAGCCCCGAGAACCACAGG | |
| | TGTACACCCTGCCCCCATGCCGGGAGGAGATGACCAAGAACCAG | |
| | GTCAGCCTGTGGTGCCTGGTCAAAGGCTTCTATCCCAGCGACATC | |
| | GCCGTGGAGTGGGAGAGCAATGGGCAGCCGGAGAACAACTACAA | |
| | GACCACGCCTCCCGTGCTGGACTCCGACGGCTCCTTCTTCCTCTAC | |
| | AGCAAGCTCACCGTGGACAAGAGCAGGTGGCAGCAGGGGAACGT | |
| | CTTCTCATGCTCCGTGATGCATGAGGCTCTGCACAACCACTACAC | |
| | GCAGAAGAGCCTCTCCCTGTCTCCGGGTAAA | |
| GPB06 LC | CAAATTGTCCTCACCCAATCACCAGCTATAATGTCTGCTTTTCCCG | 517 |
| | GCGAGAAAGTAACCATGACTTGTAGCGCCTCTAGTAGCGTGTCAT | |
| | ATATGTATTGGTATCAACAAAAGAGCGGTAGTTCACCTCGACTCC | |
| | TTATCTACGACACAAGTAATCTCGCTAGTGGTGTCCCAGTCCGTTT | |
| | CTCCGGGAGCGGCAGCGGCACATCATACTCCCTGACCATCTCCAG | |
| | AATGGAGGCCGAGGACGCTGCCACATACTATTGTCAGCAGTGGAG | |
| | CTCATATCCTTTGACATTCGGTGGAGGTACTAAACTCGAAATCAA | |
| | GCGTACGGTGGCAGCTCCCAGCGTTTTTATCTTTCCCCCAGATGTT | |
| | GTTATGACTCAGTCACCTCTCTCACTTCCTGTAACCCCTGGTGAAC | |
| | CAGCCTCTATAAGCTGCCGGTCAAGTCAAAGCCTGGTTCATAGCA | |
| | ACCGTAACACTTACCTTCACTGGTACTTGCAAAAACCTGGTCAGT | |
| | CCCCACAACTCTTGATCTACAAAGTCTCCAATCGCTTCTCTGGAGT | |
| | CCCTGACAGGTTTTCTGGTAGTGGATCAGGTACAGACTTCACTTTG | |
| | AAAATCAGCCGCGTTGAGGCCGAGGACGTGGGAGTGTATTATTGC | |
| | TCTCAGAATACCCATGTACCCCCAACCTTTGGCTGTGGGACTAAA | |
| | CTCGAGATTAAACGTACGGTGGCAGCTCCCAGCGTTTTTATCTTTC | |
| | CCCCATCCGACGAGCAGCTCAAGAGTGGCACTGCCTCTGTAGTTT | |
| | GTTTGCTGAATAACTTCTATCCACGTGAAGCAAAAGTACAGTGGA | |
| | AGGTCGATAATGCCCTTCAGAGCGGTAACAGCCAAGAAAGTGTTA | |
| | CCGAGCAAGATTCCAAAGATTCCACTTACAGTCTGTCCAGCACAT | |
| | TGACACTGAGTAAGGCTGATTACGAAAAACACAAGGTGTACGCAT | |
| | GCGAGGTGACACACCAAGGTCTTTCATCTCCTGTAACTAAGAGCT | |
| | TTAACCGGGGAGAATGTGGTGGTGGGGGCAGCGGGGGCGGAGGT | |
| | AGTGGAGGCGGCGGTAGTGAACCAAAGAGTAGTGACAAAACTCA | |
| | CACGTGCCCACCGTGCCCAGCACCTGAACTCCTGGGGGGACCGTC | |
| | AGTCTTCCTCTTCCCCCCAAAACCCAAGGACACCCTCATGATCTCC | |
| | CGGACCCCTGAGGTCACATGCGTGGTGGTGGACGTGAGCCACGAA | |
| | GACCCTGAGGTCAAGTTCAACTGGTACGTGGACGGCGTGGAGGTG | |
| | CATAATGCCAAGACAAAGCCGCGGGAGGAGCAGTACAACAGCAC | |
| | GTACCGTGTGGTCAGCGTCCTCACCGTCCTGCACCAGGACTGGCT | |
| | GAATGGCAAGGAGTACAAGTGCAAGGTCTCCAACAAAGCCCTCC | |
| | CAGCCCCCATCGAGAAAACCATCTCCAAAGCCAAAGGGCAGCCC | |
| | CGAGAACCACAGGTGTACACCCTGCCCCCATGCCGGGAGGAGAT | |
| | GACCAAGAACCAGGTCAGCCTGTGGTGCCTGGTCAAAGGCTTCTA | |
| | TCCCAGCGACATCGCCGTGGAGTGGGAGAGCAATGGGCAGCCGG | |
| | AGAACAACTACAAGACCACGCCTCCCGTGCTGGACTCCGACGGCT | |
| | CCTTCTTCCTCTACAGCAAGCTCACCGTGGACAAGAGCAGGTGGC | |
| | AGCAGGGGAACGTCTTCTCATGCTCCGTGATGCATGAGGCTCTGC | |
| | ACAACCACTACACGCAGAAGAGCCTCTCCCTGTCTCCGGGTAAA | |

[0370] Table 46 below shows the polypeptide sequences of the heavy chain variable region (VH) and light chain variable region (VL) of the engineered antibodies targeting GPC-3. Table 47 below shows the nucleotide sequences of the heavy chain variable region (VH) and light chain variable region (VL) of the engineered antibodies targeting GPC-3.

TABLE 46

| | | | SEQ |
|---|---|---|---|
| Name | | Sequence | ID NO |
| GPM01 | VH | EVQLVESGGGLVKPGGSLKLSCAASGFTFSRYAMSWVRQIPEKCLEW | 81 |
| | | VAAIDSSGGDTYYLDTVKDRFTTSRDNANNTLHLQMRSLRSEDTALY | |
| | | YCVRQGGAYWGQGTLVTVSS | |
| | VL | DVVMTQTPLTLSVTTGQPASISCKSSQSLLDSDGKTYLNWLLQRPGQS | 82 |
| | | PKRLIYLVSKLDSGAPDRFTGSGSGTDFTLKISRVEAEDLGIYYCWQG | |
| | | THFPLTFGCGTKLEIK | |
| GPM02 | VH | QVQLVQSGAEVKKPGASVKVSCKASGYTFTDYEMHWVRQAPGQCL | 83 |
| | | EWMGALDPKTGDTAYSQKFKGRVTLTADKSTSTAYMELSSLTSEDT | |
| | | AVYYCTRFYSYTYWGQGTLVTVSS | |
| | VL | DVVMTQSPLSLPVTPGEPASISCRSSQSLVHSNRNTYLHWYLQKPGQS | 84 |
| | | PQLLIYKVSNRFSGVPDRFSGSGSGTDFTLKISRVEAEDVGVYYCSQN | |
| | | THVPPTFGCGTKLEIK | |
| GPM04 | VH | EVQLVETGGGLVQPKGSLKLSCAASGFTFNASAMNWVRQAPGKCLE | 85 |
| | | WVARIRSKSNNYAIYYADSVKDRFTTSRDDSQSMLYLQMNNLKTEDT | |
| | | AMYYCVRDPGYYGNPWFAYWGQGTLVTVSS | |
| | VL | QIVLTQSPAIMSAFPGEKVTMTCSASSSVSYMYWYQQKSGSSPRLLIY | 86 |
| | | DTSNLASGVPVRFSGSGSGTSYSLTTSRMEAEDAATYYCQQWSSYPLT | |
| | | FGCGTKLEIK | |
| GPB01 | VH1 | QVQLVQSGAEVKKPGASVKVSCKASGYTFTDYEMHWVRQAPGQGL | 87 |
| | | EWMGALDPKTGDTAYSQKFKGRVTLTADKSTSTAYMELSSLTSEDT | |
| | | AVYYCTRFYSYTYWGQGTLVTVSS | |
| | VH2 | EVQLVESGGGLVKPGGSLKLSCAASGFTFSRYAMSWVRQIPEKCLEW | 81 |
| | | VAAIDSSGGDTYYLDTVKDRFTTSRDNANNTLHLQMRSLRSEDTALY | |
| | | YCVRQGGAYWGQGTLVTVSS | |
| | VL1 | DVVMTQSPLSLPVTPGEPASISCRSSQSLVHSNRNTYLHWYLQKPGQS | 88 |
| | | PQLLIYKVSNRFSGVPDRFSGSGSGTDFTLKISRVEAEDVGVYYCSQN | |
| | | THVPPTFGQGTKLEIK | |
| | VL2 | DVVMTQTPLTLSVTTGQPASISCKSSQSLLDSDGKTYLNWLLQRPGQS | 82 |
| | | PKRLIYLVSKLDSGAPDRFTGSGSGTDFTLKISRVEAEDLGIYYCWQG | |
| | | THFPLTFGCGTKLEIK | |
| GPB03 | VH1 | QVQLVQSGAEVKKPGASVKVSCKASGYTFTDYEMHWVRQAPGQGL | 87 |
| | | EWMGALDPKTGDTAYSQKFKGRVTLTADKSTSTAYMELSSLTSEDT | |
| | | AVYYCTRFYSYTYWGQGTLVTVSS | |
| | VH2 | EVQLVETGGGLVQPKGSLKLSCAASGFTFNASAMNWVRQAPGKCLE | 85 |
| | | WVARIRSKSNNYAIYYADSVKDRFTTSRDDSQSMLYLQMNNLKTEDT | |
| | | AMYYCVRDPGYYGNPWFAYWGQGTLVTVSS | |
| | VL1 | DVVMTQSPLSLPVTPGEPASISCRSSQSLVHSNRNTYLHWYLQKPGQS | 88 |
| | | PQLLIYKVSNRFSGVPDRFSGSGSGTDFTLKISRVEAEDVGVYYCSQN | |
| | | THVPPTFGQGTKLEIK | |
| | VL2 | QIVLTQSPAIMSAFPGEKVTMTCSASSSVSYMYWYQQKSGSSPRLLIY | 86 |
| | | DTSNLASGVPVRFSGSGSGTSYSLTTSRMEAEDAATYYCQQWSSYPLT | |
| | | FGCGTKLEIK | |
| GPB04 | VH1 | EVQLVESGGGLVKPGGSLKLSCAASGFTFSRYAMSWVRQIPEKILEW | 89 |
| | | VAAIDSSGGDTYYLDTVKDRFTTSRDNANNTLHLQMRSLRSEDTALY | |
| | | YCVRQGGAYWGQGTLVTVSS | |
| | VH2 | QVQLVQSGAEVKKPGASVKVSCKASGYTFTDYEMHWVRQAPGQCL | 83 |
| | | EWMGALDPKTGDTAYSQKFKGRVTLTADKSTSTAYMELSSLTSEDT | |
| | | AVYYCTRFYSYTYWGQGTLVTVSS | |
| | VL1 | DVVMTQTPLTLSVTTGQPASISCKSSQSLLDSDGKTYLNWLLQRPGQS | 90 |
| | | PKRLIYLVSKLDSGAPDRFTGSGSGTDFTLKISRVEAEDLGIYYCWQG | |
| | | THFPLTFGAGTKLEIK | |
| | VL2 | DVVMTQSPLSLPVTPGEPASISCRSSQSLVHSNRNTYLHWYLQKPGQS | \|84 |
| | | PQLLIYKVSNRFSGVPDRFSGSGSGTDFTLKISRVEAEDVGVYYCSQN | |
| | | THVPPTFGCGTKLEIK | |
| GPB06 | VH1 | EVQLVETGGGLVQPKGSLKLSCAASGFTFNASAMNWVRQAPGKGLE | 91 |
| | | WVARIRSKSNNYAIYYADSVKDRFTTSRDDSQSMLYLQMNNLKTEDT | |
| | | AMYYCVRDPGYYGNPWFAYWGQGTLVTVSS | |
| | VH2 | QVQLVQSGAEVKKPGASVKVSCKASGYTFTDYEMHWVRQAPGQCL | 83 |
| | | EWMGALDPKTGDTAYSQKFKGRVTLTADKSTSTAYMELSSLTSEDT | |
| | | AVYYCTRFYSYTYWGQGTLVTVSS | |
| | VL1 | QIVLTQSPAIMSAFPGEKVTMTCSASSSVSYMYWYQQKSGSSPRLLIY | 92 |
| | | DTSNLASGVPVRFSGSGSGTSYSLTTSRMEAEDAATYYCQQWSSYPLT | |
| | | FGGGTKLEIK | |
| | VL2 | DVVMTQSPLSLPVTPGEPASISCRSSQSLVHSNRNTYLHWYLQKPGQS | 84 |
| | | PQLLIYKVSNRFSGVPDRFSGSGSGTDFTLKISRVEAEDVGVYYCSQN | |
| | | THVPPTFGCGTKLEIK | |

TABLE 47

| | | | SEQ |
|---|---|---|---|
| Name | | Sequence | ID NO |
| GPM01 | VH | GAAGTTCAGCTTGTCGAAAGTGGCGGAGGTCTTGTAAAGCCAGGAGGGTCCCTGAAGTTGA | 518 |
| | | GTTGTGCTGCCTCTGGCTTCACCTTTTCACGGTATGCCATGTCCTGGGTTCGACAGATACC | |
| | | TGAGAAGTGTCTTGAATGGGTGGCCGCAATAGACAGTAGCGGTGGTGACACCTATTACCTC | |
| | | GACACAGTCAAAGACCGCTTTACTATCTCACGCGATAACGCCAACAATACCCTGCACTTGC | |
| | | AGATGCGATCACTTCGTTCAGAAGACACTGCTCTTTACTATTGTGTACGCCAAGGGGGAGC | |
| | | ATACTGGGGTCAGGGAACACTGGTTACCGTGTCTTCA | |
| | VL | GACGTGGTTATGACTCAGACTCCTCTGACTCTCTCCGTCACTATTGGTCAGCCCGCTTCCA | 519 |
| | | TATCATGTAAATCATCACAATCTCTTCTTGATAGCGATGGCAAGACTTATTTGAACTGGTT | |
| | | GTTGCAACGCCCAGGTCAGAGCCCTAAGAGACTTATCTATTTGGTGAGCAAACTCGACAGC | |
| | | GGTGCACCCGATCGTTTTACCGGAAGCGGCAGCGGCACCGATTTCACACTGAAGATCAGTA | |
| | | GGGTCGAAGCTGAAGACCTGGGAATCTACTACTGCTGGCAAGGTACTCACTTTCCCCTGAC | |
| | | TTTCGGCTGCGGTACTAAACTTGAGATCAAA | |
| GPM02 | VH | CAGGTTCAGCTTGTGCAATCAGGCGCTGAAGTCAAAAAACCAGGAGCAAGCGTGAAAGTAA | 520 |
| | | GCTGTAAGGCTTCCGGTTACACTTTCACCGATTACGAAATGCACTGGGTACGCCAGGCTCC | |
| | | TGGACAATGTCTGGAATGGATGGGCGCACTTGATCCAAAAACAGGTGACACTGCTTACAGT | |
| | | CAAAAATTCAAAGGTCGTGTCACTCTTACAGCAGATAAGTCCACCAGTACCGCTTATATGG | |
| | | AGCTTAGCTCCCTGACTTCCGAGGACACCGCCGTGTATTATTGTACAAGATTCTACTCATA | |
| | | TACTTACTGGGGCCAAGGAACCCTGGTGACAGTGTCATCT | |
| | VL | GATGTTGTTATGACTCAGTCACCTCTCTCACTTCCTGTAACCCCTGGTGAACCAGCCTCTA | 521 |
| | | TAAGCTGCCGGTCAAGTCAAAGCCTGGTTCATAGCAACCGTAACACTTACCTTCACTGGTA | |
| | | CTTGCAAAAACCTGGTCAGTCCCCACAACTCTTGATCTACAAAGTCTCCAATCGCTTCTCT | |
| | | GGAGTCCCTGACAGGTTTTCTGGTAGTGGATCAGGTACAGACTTCACTTTGAAAATCAGCC | |
| | | GCGTTGAGGCCGAGGACGTGGGAGTGTATTATTGCTCTCAGAATACCCATGTACCCCCAAC | |
| | | CTTTGGCTGTGGGACTAAACTCGAGATTAAA | |
| GPM04 | VH | GAAGTGCAACTGGTCGAAACAGGCGGGGGACTGGTACAGCCCAAGGGATCTTTGAAACTTA | 522 |
| | | GTTGTGCTGCTAGTGGGTTTACATTCAATGCCTCCGCAATGAACTGGGTAAGACAAGCTCC | |
| | | TGGCAAGTGCCTGGAATGGGTGGCCCGTATTCGCTCTAAAAGTAATAACTACGCTATTTAT | |
| | | TACGCTGATTCTGTAAAGGATCGGTTTACAATAAGTCGGGACGACAGCCAATCCATGCTGT | |
| | | ATCTCCAAATGAATAACCTGAAAACAGAGGATACTGCCATGTACTATTGTGTGCGGGACCC | |
| | | AGGCTATTACGGGAATCCCTGGTTCGCCTATTGGGGACAGGGCACTCTGGTTACCGTATCA | |
| | | TCA | |
| | VL | CAAATTGTCCTCACCCAATCACCAGCTATAATGTCTGCTTTTCCCGGCGAGAAAGTAACCA | 523 |
| | | TGACTTGTAGCGCCTCTAGTAGCGTGTCATATATGTATTGGTATCAACAAAAGAGCGGTAG | |
| | | TTCACCTCGACTCCTTATCTACGACACAAGTAATCTCGCTAGTGGTGTCCCAGTCCGTTTC | |
| | | TCCGGGAGCGGCAGCGGCACATCATACTCCCTGACCATCTCCAGAATGGAGGCCGAGGACG | |
| | | CTGCCACATACTATTGTCAGCAGTGGAGCTCATATCCTTTGACATTCGGTTGCGGTACTAA | |
| | | ACTCGAAATCAAG | |
| GPB01 | VH1 | CAGGTGCAACTCGTTCAAAGCGGGGCCGAGGTGAAGAAACCAGGGGCCTCAGTTAAGGTGA | 434 |
| | | GTTGCAAGGCAAGTGGATACACTTTCACCGATTATGAAATGCATTGGGTGCGTCAGGCCCC | |
| | | AGGACAAGGACTGGAGTGGATGGGCGCTCTCGATCCTAAGACTGGTGATACTGCTTACTCT | |
| | | CAAAAGTTCAAAGGCCGAGTCACCTTGACCGCCGACAAGTCCACATCCACTGCATATATGG | |
| | | AATTGTCAAGTCTGACAAGCGAAGATACAGCCGTCTACTACTGCACCCGCTTTTATAGCTA | |
| | | TACATATTGGGGACAGGGGACCTTGGTTACTGTGTCATCT | |
| | VH2 | GAAGTTCAGCTTGTCGAAAGTGGCGGAGGTCTTGTAAAGCCAGGAGGGTCCCTGAAGTTGA | 518 |
| | | GTTGTGCTGCCTCTGGCTTCACCTTTTCACGGTATGCCATGTCCTGGGTTCGACAGATACC | |
| | | TGAGAAGTGTCTTGAATGGGTGGCCGCAATAGACAGTAGCGGTGGTGACACCTATTACCTC | |
| | | GACACAGTCAAAGACCGCTTTACTATCTCACGCGATAACGCCAACAATACCCTGCACTTGC | |
| | | AGATGCGATCACTTCGTTCAGAAGACACTGCTCTTTACTATTGTGTACGCCAAGGGGGAGC | |
| | | ATACTGGGGTCAGGGAACACTGGTTACCGTGTCTTCA | |
| | VL1 | GACGTGGTAATGACACAATCACCTTTGTCTCTTCCCGTAACCCCCGGTGAACCAGCCAGCA | 435 |
| | | TCTCATGCAGAAGCAGTCAGTCACTGGTACATTCCAACCGTAATACTTATCTTCACTGGTA | |
| | | CTTGCAGAAGCCTGGGCAGTCTCCTCAACTTTTGATATATAAAGTGAGCAATCGGTTTAGC | |
| | | GGTGTCCCAGACCGCTTTTCTGGATCTGGAAGTGGAACAGACTTTACTCTGAAAATAAGCA | |
| | | GAGTCGAGGCAGAAGATGTCGGAGTTTACTACTGTAGCCAGAACACACACGTACCCCCAAC | |
| | | CTTTGGACAGGGCACAAAGTTGGAAATCAAG | |
| | VL2 | GACGTGGTTATGACTCAGACTCCTCTGACTCTCTCCGTCACTATTGGTCAGCCCGCTTCCA | 519 |
| | | TATCATGTAAATCATCACAATCTCTTCTTGATAGCGATGGCAAGACTTATTTGAACTGGTT | |
| | | GTTGCAACGCCCAGGTCAGAGCCCTAAGAGACTTATCTATTTGGTGAGCAAACTCGACAGC | |
| | | GGTGCACCCGATCGTTTTACCGGAAGCGGCAGCGGCACCGATTTCACACTGAAGATCAGTA | |
| | | GGGTCGAAGCTGAAGACCTGGGAATCTACTACTGCTGGCAAGGTACTCACTTTCCCCTGAC | |
| | | TTTCGGCTGCGGTACTAAACTTGAGATCAAA | |
| GPB03 | VH1 | CAGGTGCAACTCGTTCAAAGCGGGGCCGAGGTGAAGAAACCAGGGGCCTCAGTTAAGGTGA | 434 |
| | | GTTGCAAGGCAAGTGGATACACTTTCACCGATTATGAAATGCATTGGGTGCGTCAGGCCCC | |
| | | AGGACAAGGACTGGAGTGGATGGGCGCTCTCGATCCTAAGACTGGTGATACTGCTTACTCT | |
| | | CAAAAGTTCAAAGGCCGAGTCACCTTGACCGCCGACAAGTCCACATCCACTGCATATATGG | |
| | | AATTGTCAAGTCTGACAAGCGAAGATACAGCCGTCTACTACTGCACCCGCTTTTATAGCTA | |
| | | TACATATTGGGGACAGGGGACCTTGGTTACTGTGTCATCT | |
| | VH2 | GAAGTGCAACTGGTCGAAACAGGCGGGGGACTGGTACAGCCCAAGGGATCTTTGAAACTTA | 522 |
| | | GTTGTGCTGCTAGTGGGTTTACATTCAATGCCTCCGCAATGAACTGGGTAAGACAAGCTCC | |
| | | TGGCAAGTGCCTGGAATGGGTGGCCCGTATTCGCTCTAAAAGTAATAACTACGCTATTTAT | |
| | | TACGCTGATTCTGTAAAGGATCGGTTTACAATAAGTCGGGACGACAGCCAATCCATGCTGT | |
| | | ATCTCCAAATGAATAACCTGAAAACAGAGGATACTGCCATGTACTATTGTGTGCGGGACCC | |
| | | AGGCTATTACGGGAATCCCTGGTTCGCCTATTGGGGACAGGGCACTCTGGTTACCGTATCA | |
| | | TCA | |
| | VL1 | GACGTGGTAATGACACAATCACCTTTGTCTCTTCCCGTAACCCCCGGTGAACCAGCCAGCA | 435 |
| | | TCTCATGCAGAAGCAGTCAGTCACTGGTACATTCCAACCGTAATACTTATCTTCACTGGTA | |
| | | CTTGCAGAAGCCTGGGCAGTCTCCTCAACTTTTGATATATAAAGTGAGCAATCGGTTTAGC | |
| | | GGTGTCCCAGACCGCTTTTCTGGATCTGGAAGTGGAACAGACTTTACTCTGAAAATAAGCA | |
| | | GAGTCGAGGCAGAAGATGTCGGAGTTTACTACTGTAGCCAGAACACACACGTACCCCCAAC | |
| | | CTTTGGACAGGGCACAAAGTTGGAAATCAAG | |
| | VL2 | CAAATTGTCCTCACCCAATCACCAGCTATAATGTCTGCTTTTCCCGGCGAGAAAGTAACCA | 523 |
| | | TGACTTGTAGCGCCTCTAGTAGCGTGTCATATATGTATTGGTATCAACAAAAGAGCGGTAG | |
| | | TTCACCTCGACTCCTTATCTACGACACAAGTAATCTCGCTAGTGGTGTCCCAGTCCGTTTC | |
| | | TCCGGGAGCGGCAGCGGCACATCATACTCCCTGACCATCTCCAGAATGGAGGCCGAGGACG | |
| | | CTGCCACATACTATTGTCAGCAGTGGAGCTCATATCCTTTGACATTCGGTTGCGGTACTAA | |
| | | ACTCGAAATCAAG | |
| GPB04 | VH1 | GAAGTTCAGCTTGTCGAAAGTGGCGGAGGTCTTGTAAAGCCAGGAGGGTCCCTGAAGTTGA | 524 |
| | | GTTGTGCTGCCTCTGGCTTCACCTTTTCACGGTATGCCATGTCCTGGGTTCGACAGATACC | |
| | | TGAGAAGATTCTTGAATGGGTGGCCGCAATAGACAGTAGCGGTGGTGACACCTATTACCTC | |
| | | GACACAGTCAAAGACCGCTTTACTATCTCACGCGATAACGCCAACAATACCCTGCACTTGC | |
| | | AGATGCGATCACTTCGTTCAGAAGACACTGCTCTTTACTATTGTGTACGCCAAGGGGGAGC | |
| | | ATACTGGGGTCAGGGAACACTGGTTACCGTGTCTTCA | |
| | VH2 | CAGGTTCAGCTTGTGCAATCAGGCGCTGAAGTCAAAAAACCAGGAGCAAGCGTGAAAGTAA | 520 |
| | | GCTGTAAGGCTTCCGGTTACACTTTCACCGATTACGAAATGCACTGGGTACGCCAGGCTCC | |
| | | TGGACAATGTCTGGAATGGATGGGCGCACTTGATCCAAAAACAGGTGACACTGCTTACAGT | |
| | | CAAAAATTCAAAGGTCGTGTCACTCTTACAGCAGATAAGTCCACCAGTACCGCTTATATGG | |
| | | AGCTTAGCTCCCTGACTTCCGAGGACACCGCCGTGTATTATTGTACAAGATTCTACTCATA | |
| | | TACTTACTGGGGCCAAGGAACCCTGGTGACAGTGTCATCT | |
| | VL1 | GACGTGGTTATGACTCAGACTCCTCTGACTCTCTCCGTCACTATTGGTCAGCCCGCTTCCA | 525 |
| | | TATCATGTAAATCATCACAATCTCTTCTTGATAGCGATGGCAAGACTTATTTGAACTGGTT | |
| | | GTTGCAACGCCCAGGTCAGAGCCCTAAGAGACTTATCTATTTGGTGAGCAAACTCGACAGC | |
| | | GGTGCACCCGATCGTTTTACCGGAAGCGGCAGCGGCACCGATTTCACACTGAAGATCAGTA | |
| | | GGGTCGAAGCTGAAGACCTGGGAATCTACTACTGCTGGCAAGGTACTCACTTTCCCCTGAC | |
| | | TTTCGGCGCCGGTACTAAACTTGAGATCAAA | |
| | VL2 | GATGTTGTTATGACTCAGTCACCTCTCTCACTTCCTGTAACCCCTGGTGAACCAGCCTCTA | 521 |
| | | TAAGCTGCCGGTCAAGTCAAAGCCTGGTTCATAGCAACCGTAACACTTACCTTCACTGGTA | |
| | | CTTGCAAAAACCTGGTCAGTCCCCACAACTCTTGATCTACAAAGTCTCCAATCGCTTCTCT | |
| | | GGAGTCCCTGACAGGTTTTCTGGTAGTGGATCAGGTACAGACTTCACTTTGAAAATCAGCC | |
| | | GCGTTGAGGCCGAGGACGTGGGAGTGTATTATTGCTCTCAGAATACCCATGTACCCCCAAC | |
| | | CTTTGGCTGTGGGACTAAACTCGAGATTAAA | |
| GPB06 | VH1 | GAAGTGCAACTGGTCGAAACAGGCGGGGGACTGGTACAGCCCAAGGGATCTTTGAAACTTA | 526 |
| | | GTTGTGCTGCTAGTGGGTTTACATTCAATGCCTCCGCAATGAACTGGGTAAGACAAGCTCC | |
| | | TGGCAAGGGCCTGGAATGGGTGGCCCGTATTCGCTCTAAAAGTAATAACTACGCTATTTAT | |
| | | TACGCTGATTCTGTAAAGGATCGGTTTACAATAAGTCGGGACGACAGCCAATCCATGCTGT | |
| | | ATCTCCAAATGAATAACCTGAAAACAGAGGATACTGCCATGTACTATTGTGTGCGGGACCC | |
| | | AGGCTATTACGGGAATCCCTGGTTCGCCTATTGGGGACAGGGCACTCTGGTTACCGTATCA | |
| | | TCA | |
| | VH2 | CAGGTTCAGCTTGTGCAATCAGGCGCTGAAGTCAAAAAACCAGGAGCAAGCGTGAAAGTAA | 520 |
| | | GCTGTAAGGCTTCCGGTTACACTTTCACCGATTACGAAATGCACTGGGTACGCCAGGCTCC | |
| | | TGGACAATGTCTGGAATGGATGGGCGCACTTGATCCAAAAACAGGTGACACTGCTTACAGT | |
| | | CAAAAATTCAAAGGTCGTGTCACTCTTACAGCAGATAAGTCCACCAGTACCGCTTATATGG | |
| | | AGCTTAGCTCCCTGACTTCCGAGGACACCGCCGTGTATTATTGTACAAGATTCTACTCATA | |
| | | TACTTACTGGGGCCAAGGAACCCTGGTGACAGTGTCATCT | |
| | VL1 | CAAATTGTCCTCACCCAATCACCAGCTATAATGTCTGCTTTTCCCGGCGAGAAAGTAACCA | 527 |
| | | TGACTTGTAGCGCCTCTAGTAGCGTGTCATATATGTATTGGTATCAACAAAAGAGCGGTAG | |
| | | TTCACCTCGACTCCTTATCTACGACACAAGTAATCTCGCTAGTGGTGTCCCAGTCCGTTTC | |
| | | TCCGGGAGCGGCAGCGGCACATCATACTCCCTGACCATCTCCAGAATGGAGGCCGAGGACG | |
| | | CTGCCACATACTATTGTCAGCAGTGGAGCTCATATCCTTTGACATTCGGTGGAGGTACTCC | |
| | | ACTCGAAATCAAG | |
| | VL2 | GATGTTGTTATGACTCAGTCACCTCTCTCACTTCCTGTAACCCCTGGTGAACCAGCCTCTA | 521 |
| | | TAAGCTGCCGGTCAAGTCAAAGCCTGGTTCATAGCAACCGTAACACTTACCTTCACTGGTA | |
| | | CTTGCAAAAACCTGGTCAGTCCCCACAACTCTTGATCTACAAAGTCTCCAATCGCTTCTCT | |
| | | GGAGTCCCTGACAGGTTTTCTGGTAGTGGATCAGGTACAGACTTCACTTTGAAAATCAGCC | |
| | | GCGTTGAGGCCGAGGACGTGGGAGTGTATTATTGCTCTCAGAATACCCATGTACCCCCAAC | |
| | | CTTTGGCTGTGGGACTAAACTCGAGATTAAA | |

[0371] Table 48 below shows the heavy chain and light chain CDR sequences of the engineered antibodies targeting GPC-3.

TABLE 48

| Name | CDR | Sequence | SEQ ID NO |
|---|---|---|---|
| GPM01 | CDR-H1 | RYAMS | 93 |
| | CDR-H2 | AIDSSGGDTYYLDTVKD | 94 |
| | CDR-H3 | QGGAY | 95 |
| | CDR-L1 | KSSQSLLDSDGKTYLN | 96 |
| | CDR-L2 | LVSKLDS | 97 |
| | CDR-L3 | WQGTHFPLT | 98 |
| GPM02 | CDR-H1 | DYEMH | 99 |
| | CDR-H2 | ALDPKTGDTAYSQKFKG | 100 |
| | CDR-H3 | FYSYTY | 101 |
| | CDR-L1 | RSSQSLVHSNRNTYLH | 102 |
| | CDR-L2 | KVSNRFS | 103 |
| | CDR-L3 | SQNTHYPPT | 104 |
| GPM04 | CDR-H1 | ASAMN | 105 |
| | CDR-H2 | RIRSKSNNYAIYYAADSVKD | 106 |
| | CDR-H3 | DPGYYGNPWFAY | 107 |
| | CDR-L1 | SASSSYSWY | 108 |
| | CDR-L2 | DTSNLAS | 109 |
| | CDR-L3 | QQWSSYPLT | 110 |
| GPB01 | V1 CDR-H1 | DYEMH | 99 |
| | V1 CDR-H2 | ALDPKTGDTAYSQKFKG | 100 |
| | V1 CDR-H3 | FYSYTY | 101 |
| | V1 CDR-L1 | RSSQSLVHSNRNTYLH | 102 |
| | V1 CDR-L2 | KVSNRFS | 103 |
| | V1 CDR-L3 | SQNTHVPPT | 104 |
| | V2 CDR-H1 | RYAMS | 93 |
| | V2 CDR-H2 | AIDSSGGDTYYLDTVKD | 94 |
| | V2 CDR-H3 | QGGQY | 95 |
| | V2 CDR-L1 | KSSQSLLDSDGKTYLN | 96 |
| | V2 CDR-L2 | LVSKLDS | 97 |
| | V2 CDR-L3 | WQGTHFPLT | 98 |
| GPB03 | V1 CDR-H1 | DYEMH | 99 |
| | V1 CDR-H2 | ALDPKTGDTAYSQKFKG | 100 |
| | V1 CDR-H3 | FYSYTY | 101 |
| | V1 CDR-L1 | RSSQSLVHSNRNTYLH | 102 |
| | V1 CDR-L2 | KVSNRFS | 103 |
| | V1 CDR-L3 | SQNTHVPPT | 104 |
| | V2 CDR-H1 | ASAMN | 105 |
| | V2 CDR-H2 | RIRSKSNNYAIYYADSVKD | 106 |
| | V2 CDR-H3 | DPGYYGNPWFAY | 107 |
| | V2 CDR-L1 | SASSSVSYMY | 108 |
| | V2 CDR-L2 | DTSNLAS | 100 |
| | V2 CDR-L3 | QQWSSYPLT | 110 |
| GPB04 | V1 CDR-H1 | RYAMS | 93 |
| | V1 CDR-H2 | AIDSSGGDTYYLDTVKD | 94 |
| | V1 CDR-H3 | QGGAY | 95 |
| | V1 CDR-L1 | KSSQSLLDSDGKTYLN | 96 |
| | V1 CDR-L2 | LVSKLDS | 97 |
| | V1 CDR-L3 | WQGTHFPLT | 98 |
| | V2 CDR-H1 | DYEMH | 99 |
| | V2 CDR-H2 | ALDPKTGDTAYSQKFKG | 100 |
| | V2 CDR-H3 | FYSYTY | 101 |
| | V2 CDR-L1 | RSSQSLVHSNRNTYLH | 102 |
| | V2 CDR-L2 | KVSNRFS | 103 |
| | V2 CDR-L3 | SQNTHVPPT | 104 |
| GPB06 | V1 CDR-H1 | ASAMN | 105 |
| | V1 CDR-H2 | RIRSKSMMYAIIADSVKD | 106 |
| | V1 CDR-H3 | DPGYYGNPWFAY | 107 |
| | V1 CDR-L1 | SASSSVSYMY | 108 |
| | V1 CDR-L2 | DTSNLAS | 100 |
| | V1 CDR-L3 | QQWSSYPLT | 110 |
| | V2 CDR-H1 | DYENH | 99 |
| | V2 CDR-H2 | ALDFKTGDTAYSQKFKG | 100 |
| | V2 CDR-H3 | FYSYTY | 101 |
| | V2 CDR-L1 | RSSQSLVHSNRNTYLH | 102 |
| | V2 CDR-L2 | KVSNRFS | 103 |
| | V2 CDR-L3 | SQNTHVPPT | 104 |

[0372] The GPC-3 protein binding constants of GPM01, GPM02, GPM04, GPB01, GPB03, GPB04, and GPB06 were determined using the Octet Red96e (Sartorius). In order to analyze the binding constants of the seven antibodies, the human GPC-3 recombinant protein (Sino Biologicals, 10088-H08H) was loaded onto the Anti-Penta-HIS (HIS1K) biosensor (Sartorius, 18-5120). Then the seven antibodies were added in a binding reaction (300 seconds) and a dissociation reaction (1,200 seconds) at various concentrations, and their affinities for GPC-3 were calculated (FIG. 42, Table 49). Table 49 below illustrates the binding constants of the engineered antibodies targeting GPC-3.

TABLE 49

| Antibodies | Antigen | Binding mode | K_{D} (nM) | Kₐ (1/Ms) | K_{d} (1/s) |
|---|---|---|---|---|---|
| GPM01 | rhGPC3 | Monovalent | 2.7048 | 3.72E+05 | 1.01E−03 |
| GPM02 | rhGPC3 | Monovalent | 2.3799 | 1.92E+05 | 4.57E−04 |
| GPM04 | rhGPC3 | Monovalent | 38.3721 | 2.92E+04 | 1.12E−03 |
| GPB01 | rhGPC3 | Biparatopic | 0.5827 | 2.49E+05 | 1.45E−04 |
| GPB03 | rhGPC3 | Biparatopic | 0.1601 | 2.03E+05 | 3.25E−05 |
| GPB04 | rhGPC3 | Biparatopic | 0.2510 | 3.32E+05 | 8.33E−05 |
| GPB06 | rhGPC3 | Biparatopic | 0.3427 | 6.64E+04 | 2.28E−05 |

[0373] HepG2 liver cancer cell line was used to quantify the Fc loads on the surface of GPC-3 expressing cells. 100 nM human IgG1, GPM02, GPB01, GPB03, and GC33 were allowed to bind to the HepG2 cell line at 4° C. for 30 minutes, and the Fc loads were quantified using the Alexa 488 fluorescence-conjugated anti-human IgG Fcγ Fab antibody (Jackson ImmunoResearch, 109-547-008) (FIG. 43). GC33, which is a humanized antibody targeting GPC-3, was used as a positive control (Nakano et al., U.S. Pat. No. 7,919,086 B2). It was shown that higher Fc loads on the surface of cancer cells are induced by treatment of GPM02, GPB01, and GPB03 compared to GC33 (FIG. 43).

### Example 18. Design, Preparation and Analysis of Antibody Structure Targeting EPH Receptor A2 (EphA2)

[0374] The variant light chain and heavy chain polypeptide sequences of the antibodies that specifically bind to the EPH receptor A2 (EphA2) protein are shown in Table 46. For EPB01, expression vectors consisting of the sequences corresponding to Fc-Hole (SEQ ID NO: 7), EPB01 HC (SEQ ID NO: 111), and EPB01 LC (SEQ ID NO: 112) were co-transfected into EXPICHO-S™ (Gibco, A29127) (FIG. 41b, Table 50), and purification and analysis were performed in the same manner as described in Example 1. Expression, purification and analysis were performed for EPB02, EPB03, EPB04, EPB05, EPB06, EPB07, EPB08, EPB09, EPB10, EPB11, and EPB12 in the same manner as mentioned above (Table 50). The 12 antibodies have structures in which the variable regions that bind to two different epitopes of EphA2 are linked with a polypeptide linker (SEQ ID NO: 48, SEQ ID NO: 50), bind biparatopically to EphA2, and have two Fc domains (FIG. 41b, Table 50).

TABLE 50

| | | SEQ |
|---|---|---|
| | | ID |
| Name | Sequence | NO |
| EPB01 HC | EVQLLESGGGLVQPGGSLRLSCAASGFTFSRYQMMWVRQAPGKGLEWVSSISPSGGVTL | 111 |
| | YADSVKGRFTISRDNSKNTLYLQMNSLRAEDTAVYYCTRELLGTVVVPVAWKMRGYFDY | |
| | WGQLTLVTVSSASTKGPSVFPLAPEVQLLESGGGLVQPGGSLRLSCAASGFTFSHYMMA | |
| | WVRQAPGKCLEWVSRIGPSGGPTHYADSVKGRFTISRDNSKNTLYLQMNSLRAEDTAVY | |
| | YCAGYDSGYDYVAVAGPAEYFQHWGQGTLVTVSSASTKGPSVFPLAPSSKSTSGGTAAL | |
| | GCLVKDYFPEPVTVSWNSGALTSGVHTFPAVLQSSGLYSLSSVVTVPSSSLGTQTYICN | |
| | VNHKPSNTKVDKKVEPKSCDKTHTCPPCPAPELLGGPSVFLFPPKPKDTLMISRTPEVT | |
| | CVVVDVSHEDPEVKFNWYVDGVEVHNAKTKPREEQYNSTYRVVSLVTVLHQDWLNGKEY | |
| | KCKVSNKALPAPIEKTISKAKGQPREPQVYTLPPCREEMTKNQVSLWCLVKGFYPSDIA | |
| | VEWESNGQPENNYKTTPPVLDSDGSFFLYSKLTVDKSRWQQGNVFSCSVMHEALHNHYT | |
| | QKSLSLSPGK | |
| EPB01 LC | DIQMTQSPGTLSVSPGERATLSCRASQSVSSNLAWYQQKPGQAPRLLIYGASTRATGIP | 112 |
| | ARFSGSGSGTEFTLTISSMQSEDFAVYYCQQYNNWPPLTFGGGTKVEIKRTVAAPSVFI | |
| | FPPDIQMTQSPSSLSASVGDRVTITCRASQSISTWLAWYQQKPGKAPKLLIYKASNLHT | |
| | GVPSRFSGSGSGTEFSLTISGLQPDDFATYYCQQYNSYSRTFGCGTKVEIKRTVAAPSV | |
| | FIFPPSDEQLKSGTASVVCLLNNFYPREAKVQWKVDNALQSGNSQESVTEQDSKDSTYS | |
| | LSSTLTLSKADYEKHKVYACEVTHQGLSSPVTKSFNRGECGGGGSGGGGSGGGGSEPKS | |
| | SDKTHTCPPCPAPELLGGPSVFLFPPLPKDTLMISRTPEVTCVVVDVSHEDPEVKFNWY | |
| | VDGVEVHNAKTKPREEQYNSTYRVVSVLTVLHQDWLNGKEYKCKVSNKALPAPIEKTIS | |
| | KAKGQPREPQVYTLPPCREEMTKNQVSLWCLVKGFYPSDIAVEWESNGQPENNYKTTPP | |
| | VLDSDGSFFLYSKLTVDKSRWQQGNVFSCSVMHEALHNHYTQKSLSLSPGK | |
| EPB02 HC | EVQLVESGGGVVRPGGSLRLSCAASGFTVSDYSMNWVRQAPGKGLEWIGFIRNKANAYT | 113 |
| | TEYSASVKGRFTISRDDSKNTLYLQMNSLKTEDTAVYYCTTYPRYHAMDSWGQGTMVTV | |
| | SSASTKGPSVFPLAPEVQLLESGGGLVQPGGSLRLSCAASGFTFSHYMMAWVRQAPGKC | |
| | LEWVSRIGPSGGPTHYADSVKGRFTISRDNSKNTLYLQMNSLRAEDTAVYYCAGYDSGY | |
| | DYVAVAGPAEYFQHWGQGTLVTVSSASTKGPSVFPLAPSSKSTSGGTAALGCLVKDYFP | |
| | EPVTVSWNSGALTSGVHTFPAVLQSSGLYSLSSVVTVPSSSLGTQTYICNVNHKPSNTK | |
| | VDKKVEPKSCDKTHTCPPCPAPELLGGPSVFLFPPKPKDTLMISRTPEVTCVVVDVSHE | |
| | DPEVKFNWYVDGVEVHNAKTKPREEQYNSTYRVVSVLTVLHQDWLNGKEYKCKVSNKAL | |
| | PAPIEKTISKAKGQPREPQVYTLPPCREEMTKNQVSLWCLVKGFYPSDIAVEWESNGQP | |
| | ENNYKTTPPVLDSDGSFFLYSKLTVDKSRWQQGNVFSCSVMHEALHNHYTQKSLSLSPG | |
| | K | |
| EPB02 LC | AIQLTQSPSSLSASVGDRVTITCRASQSISNNLHWYLQKPGQSPSLLIYYGFQSISGVP | 114 |
| | SRFSGSGSGTDFTLTISSLQPEDFATYYCQQANSWPLTFGGGTKLEIKRTVAAPSVFIF | |
| | FPDIQMTQSPSSLSASVGDRVTITCRASQSISTWLAWYQQKPGKAPKLLIYKASNLHTG | |
| | VPSRFSGSGSGTEFSLTISGLQPDDFATYYCQQYNSYSRTFGCGTKVEIKRTVAAPSVF | |
| | IFPPSDEQLKSGTASVVCLLNNFYPREAKVQWKVDNALQSGNSQESVTEQDSKDSTYSL | |
| | SSTLTLSKADYEKHKVYACEVTHQGLSSPVTKSFNRGECGGGGSGGGGSGGGGSEPKSS | |
| | DKTHTCPPCPAPELLGGPSVFLFPPKPKDTLMISRTPEVTCVVVDVSHEDPEVKFNWYV | |
| | DGVEVHNAKTKPREEQYNSTYRVVSVLTVLHQDWLNGKEYKCKVSNKALPAPIEKTISK | |
| | AKGQPREPQVYTLPPCREEMTKNQVSLWCLVKGFYPSDIAVEWESNGQPENNYKTTPPV | |
| | LDSDGSFFLYSKLTVDKSRWQQGNVFSCSVMHEALHNHYTQKSLSLSPGK | |
| EPB03 HC | QVQLLESGGGLVQPGGSLRLSCAASGFTFSSYTMSWVRQAPGQCLEWMGTISSGGTYTY | 115 |
| | YPDSVKGRFTISRDNAKNSLYLQMNSLRAEDTAVYYCAREAIFTYWGRGTLVTVSSAST | |
| | KGPSVFPLAPEVQLLESGGGLVQPGGSLRLSCAASGFTFSHYMMAWVRQAPGKCLEWVS | |
| | RIGPSGGPTHYADSVKGRFTISRDNSKNTLYLQMNSLRAEDTAVYYCAGYDSGYDYVAV | |
| | AGPAEYFQHWGQGTLVTVSSASTKGPSVFPLAPSSKSTSGGTAALGCLVKDYFPEPVTV | |
| | SWNSGALTSGVHTFPAVLQSSGLYSLSSVVTVPSSSLGTQTYICNVNHKPSNTKVDKKV | |
| | EPKSCDKTHTCPPCPAPELLGGPSVFLFPPKPKDTLMISRTPEVTCVVVDVSHEDPEVK | |
| | FNWYVDGVEVHNAKTKPREEQYNSTYRVVSVLTVLHQDWLNGKEYKCKVSNKALPAPIE | |
| | KTISKAKGQPREPQVYTLPPCREEMTKNQVSLWCLVKGFYPSDIAVEWESNGQPENNYK | |
| | TTPPVLDSDGSFFLYSKLTVDKSRWQQGNVFSCSVMHEALHNHYTQKSLSLSPGK | |
| EPB03 LC | DIQMTQSPGTLSVSPGERVTLSCKASQDINNYLSWYQQKPDQAPKLLIKRANRLVDGVP | 116 |
| | DRFSGSGSGTDFTLKISRVEAEDVGVYYCLKYDEFPYTFGQGTRLEIKRTVAAPSVFIF | |
| | PPDIQMTQSPSSLSASVGDRVTITCRASQSISTWLAWYQQKPGKAPKLLIYKASNLHTG | |
| | VPSRFSGSGSGTEFSLTISGLQPDDFATYYCQQYNSYSRTFGCGTKVEIKRTVAAPSVF | |
| | IFPPSDEQLKSGTASVVCLLNNFYPREAKVQWKVDNALQSGNSQESVTEQDSKDSTYSL | |
| | SSTLTLSKADYEKHKVYACEVTHQGLSSPVTKSFNRGECGGGGSGGGGSGGGGSEPKSS | |
| | DKTHTCPPCPAPELLGGPSVFLFPPKPKDTLMISRTPEVTCVVVDVSHEDPEVKFNWYV | |
| | DGVEVHNAKTKPREEQYNSTYRVVSVLTVLHQDWLNGKEYKCKVSNKALPAPIEKTISK | |
| | AKGQPREPQVYTLPPCREEMTKNQVSLWCLVKGFYPSDIAVEWESNGQPENNYKTTPPV | |
| | LDSDGSFFLYSKLTVDKSRWQQGNVFSCSVMHEALHNHYTQKSLSLSPGK | |
| EPB04 HC | EVQLLESGGGLVQPGGSLRLSCAASGFTFSHYMMAWVRQAPGKCLEWVSRIGPSGGPTH | 117 |
| | YADSVKGRFTISRDNSKNTLYLQMNSLRAEDTAVYYCAGYDSGYDYVAVAGPAEYFQHW | |
| | GQGTLVTVSSASTKGPSVFPLAPEVQLLESGGGLVQPGGSLRLSCAASGFTFSRYQMMW | |
| | VRQAPGKCLEWVSSISPSGGVTLYADSVKGRFTISRDNSKNTLYLQMNSLRAEDTAVYY | |
| | CTRELLGTVVVPVAWKMRGYFDYWGQLTLVTVSSASTKGPSVFPLAPSSKSTSGGTAAL | |
| | GCLVKDYFPEPVTVSWNSGALTSGVHTFPAVLQSSGLYSLSSVVTVPSSSLGTQTYICN | |
| | VNHKPSNTKVDKKVEPKSCDKTHTCPPCPAPELLGGPSVFLFPPKPKDTLMISRTPEVT | |
| | CVVVDVSHEDPEVKFNWYVDGVEVHNAKTKPREEQYNSTYRVVSVLTVLHQDWLNGKEY | |
| | KCKVSNKALPAPIEKTISKAKGQPREPQVYTLPPCREEMTKNQVSLWCLVKGFYPSDIA | |
| | VEWESNGQPENNYKTTPPVLDSDGSFFLYSKLTVDKSRWQQGNVFSCSVMHEALHNHYT | |
| | QKSLSLSPGK | |
| EPB04 LC | DIQMTQSPGTLSVSPGERVTLSCKASQDINNYLSWYQQKPDQAPKLLIKRANRLVDGVP | 118 |
| | SRFSGSGSGTEFSLTISGLQPDDFATYYCQQYNSYSRTFGQGTRLEIKRTVAAPSVFIF | |
| | PPDIQMTQSPGTLSVSPGERATLSCRASQSVSSNLAWYQQKPGKAPKLLIYKASNLHTG | |
| | IPARFSGSGSGTEFSLTISSMQSEDFAVYYCQQYNNWPPLTFGGGTKVEIKRTVAAPSV | |
| | FIFPPSDEQLKSGTASVVCLLNNFYPREAKVQWKVDNALQSGNSQESVTEQDSKDSTYS | |
| | LSSTLTLSKADYEKHKVYACEVTHQGLSSPVTKSFNRGECGGGGSGGGGSGGGGSEPKS | |
| | SDKTHTCPPCPAPELLGGPSVFLFPPLPKDTLMISRTPEVTCVVVDVSHEDPEVKFNWY | |
| | VDGVEVHNAKTKPREEQYNSTYRVVSVLTVLHQDWLNGKEYKCKVSNKALPAPIEKTIS | |
| | KAKGQPREPQVYTLPPCREEMTKNQVSLWCLVKGFYPSDIAVEWESNGQPENNYKTTPP | |
| | VLDSDGSFFLYSKLTVDKSRWQQGNVFSCSVMHEALHNHYTQKSLSLSPGK | |
| EPB05 HC | EVQLLESGGGLVQPGGSLRLSCAASGFTFSHYMMAWVRQAPGKGLEWVSRIGPSGGPTH | 119 |
| | YADSVKGRFTISRDNSKNTLYLQMNSLRAEDTAVYYCAGYDSGYDYVAVAGPAEYFQHW | |
| | GQGTLVTVSSASTKGPSVFPLAPEVQLLESGGGVVRPGGSLRLSCAASGFTFSRYSMMW | |
| | VRQAPGKCLEWIGFIRNKANAYTTEYSASVKGRFTISRDDSKNTLYLQMNSLKTEDTAV | |
| | YYCTTYPRYHAMDSWGQGTMVTVSSASTKGPSVFPLAPSSKSTSGGTAALGCLVKDYFP | |
| | EPVTVSWNSGALTSGVHTFPAVLQSSGLYSLSSVVTVPSSSLGTQTYICNVNHKPSNTK | |
| | VDKKVEPKSCDKTHTCPPCPAPELLGGPSVFLFPPKPKDTLMISRTPEVTCVVVDVSHE | |
| | DPEVKFNWYVDGVEVHNAKTKPREEQYNSTYRVVSVLTVLHQDWLNGKEYKCKVSNKAL | |
| | PAPIEKTISKAKGQPREPQVYTLPPCREEMTKNQVSLWCLVKGFYPSDIAVEWESNGQP | |
| | ENNYKTTPPVLDSDGSFFLYSKLTVDKSRWQQGNVFSCSVMHEALHNHYTQKSLSLSPG | |
| | K | |
| EPB05 LC | DIQMTQSPGTLSVSPGERVTLSCKASQDINNYLSWYQQKPDQAPKLLIKRANRLVDGVP | 120 |
| | SRFSGSGSGTEFSLTISGLQPDDFATYYCQQYNSYSRTFGQGTKVEIKRTVAAPSVFIF | |
| | PPAIQLTQSPSSLSASVGDRVTITCRASQSISNNLHWYLQKPGQSPSLLIYYGFQSISG | |
| | VPSRFSGSGSGTDFTLTISSLQPEDFATYYCQQANSWPLTFGCGTKLEIKRTVAAPSVF | |
| | IFPPSDEQLKSGTASVVCLLNNFYPREAKVQWKVDNALQSGNSQESVTEQDSKDSTYSL | |
| | SSTLTLSKADYEKHKVYACEVTHQGLSSPVTKSFNRGECGGGGSGGGGSGGGGSEPKSS | |
| | DKTHTCPPCPAPELLGGPSVFLFPPLPKDTLMISRTPEVTCVVVDVSHEDPEVKFNWYV | |
| | DGVEVHNAKTKPREEQYNSTYRVVSVLTVLHQDWLNGKEYKCKVSNKALPAPIEKTISK | |
| | AKGQPREPQVYTLPPCREEMTKNQVSLWCLVKGFYPSDIAVEWESNGQPENNYKTTPPV | |
| | LDSDGSFFLYSKLTVDKSRWQQGNVFSCSVMHEALHNHYTQKSLSLSPGK | |
| EPB06 LC | EVQLLESGGGLVQPGGSLRLSCAASGFTFSHYMMAWVRQAPGKGLEWVSRIGPSGGPTH | 121 |
| | YADSVKGRFTISRDNSKNTLYLQMNSLRAEDTAVYYCAGYDSGYDYVAVAGPAEYFQHW | |
| | GQGTLVTVSSASTKGPSVFPLAPQVQLLESGGGLVQPGGSLRLSCAASGFTFSRYTMSW | |
| | VRQAPGQCLEWMGTISSGGTYTYYPDSVKGRFTISRDNAKNSLYLQMNSLRAEDTAVYY | |
| | CAREAIFTYWGRGTLVTVSSASTKGPSVFPLAPSSKSTSGGTAALGCLVKDYFPEPVTV | |
| | SWNSGALTSGVHTFPAVLQSSGLYSLSSVVTVPSSSLGTQTYICNVNHKPSNTKVDKKV | |
| | EPKSCDKTHTCPPCPAPELLGGPSVFLFPPKPKDTLMISRTPEVTCVVVDVSHEDPEVK | |
| | FNWYVDGVEVHNAKTKPREEQYNSTYRVVSVLTVLHQDWLNGKEYKCKVSNKALPAPIE | |
| | KTISKAKGQPREPQVYTLPPCREEMTKNQVSLWCLVKGFYPSDIAVEWESNGQPENNYK | |
| | TTPPVLDSDGSFFLYSKLTVDKSRWQQGNVFSCSVMHEALHNHYTQKSLSLSPGK | |
| EPB06 HC | DIQMTQSPSSLSASVGDRVTITCRASQSISTWLAWYQQKPDQAPKLLIKRANRLVDGVP | 122 |
| | SRFSGSGSGTEFSLTISGLQPDDFATYYCQQYNSYSRTFGQGTKVEIKRTVAAPSVFIF | |
| | PPDIQLTQSPSSLSLSPGERVTLSCKASQDINNYLSWYQQKPDQAPKLLIKRANRLVDG | |
| | VPSRFSGSGSGTDFTLTISSLQPEDFATYYCQQANSWPLTFGCGTKLEIKRTVAAPSVF | |
| | IFPPSDEQLKSGTASVVCLLNNFYPREAKVQWKVDNALQSGNSQESVTEQDSKDSTYSL | |
| | SSTLTLSKADYEKHKVYACEVTHQGLSSPVTKSFNRGECGGGGSGGGGSGGGGSEPKSS | |
| | DKTHTCPPCPAPELLGGPSVFLFPPLPKDTLMISRTPEVTCVVVDVSHEDPEVKFNWYV | |
| | DGVEVHNAKTKPREEQYNSTYRVVSVLTVLHQDWLNGKEYKCKVSNKALPAPIEKTISK | |
| | AKGQPREPQVYTLPPCREEMTKNQVSLWCLVKGFYPSDIAVEWESNGQPENNYKTTPPV | |
| | LDSDGSFFLYSKLTVDKSRWQQGNVFSCSVMHEALHNHYTQKSLSLSPGK | |
| EPB07 HC | EVQLVESGGGVVRPGGSLRLSCAASGFTVSDYSMNWVRQAPGKGLEWIGFIRNKANAYT | 123 |
| | TEYSASVKGRFTISRDDSKNTLYLQMNSLKTEDTAVYYCTTYPRYHAMDSWGQGTMVTV | |
| | SSASTKGPSVFPLAPEVQLLESGGGLVQPGGSLRLSCAASGFTFSRYQMMWVRQAPGKC | |
| | LEWVSSISPSGGVTLYADSVKGRFTISRDNSKNTLYLQMNSLRAEDTAVYYCAGYDSGY | |
| | VVVPVAWKMRGYFDYWGQLTLVTVSSASTKGPSVFPLAPSSKSTSGGTAALGCLVKDYF | |
| | PEPVTVSWNSGALTSGVHTFPAVLQSSGLYSLSSVVTVPSSSLGTQTYICNVNHKPSNT | |
| | KVDKKVEPKSCDKTHTCPPCPAPELLGGPSVFLFPPKPKDTLMISRTPEVTCVVVDVSH | |
| | EDPEVKFNWYVDGVEVHNAKTKPREEQYNSTYRVVSVLTVLHQDWLNGKEYKCKVSNKA | |
| | LPAPIEKTISKAKGQPREPQVYTLPPCREEMTKNQVSLWCLVKGFYPSDIAVEWESNGQ | |
| | PENNYKTTPPVLDSDGSFFLYSKLTVDKSRWQQGNVFSCSVMHEALHNHYTQKSLSLSP | |
| | GK | |
| EPB07 LC | AIQLTQSPSSLSASVGDRVTITCRASQSISNNLHWYLQKPGQSPSLLIYYGFQSISGVP | 124 |
| | SRFSGSGSGTDFTLTISSLQPEDFATYYCQQANSWPLTFGGGTKLEIKRTVAAPSVFIF | |
| | PPDIQMTQSPGTLSVSPGERVTLSCKASQDINNYLSWYQQKPGQAPRLLIYGASTRATG | |
| | IPARFSGSGSGTEFTLTISSMQSEDFAVYYCQQYNNWPPLTFGCGTKVEIKRTVAAPSV | |
| | FIFPPSDEQLKSGTASVVCLLNNFYPREAKVQWKVDNALQSGNSQESVTEQDSKDSTYS | |
| | LSSTLTLSKADYEKHKVYACEVTHQGLSSPVTKSFNRGECGGGGSGGGGSGGGGSEPKS | |
| | SDKTHTCPPCPAPELLGGPSVFLFPPKPKDTLMISRTPEVTCVVVDVSHEDPEVKFNWY | |
| | VDGVEVHNAKTKPREEQYNSTYRVVSVLTVLHQDWLNGKEYKCKVSNKALPAPIEKTIS | |
| | KAKGQPREPQVYTLPPCREEMTKNQVSLWCLVKGFYPSDIAVEWESNGQPENNYKTTPP | |
| | VLDSDGSFFLYSKLTVDKSRWQQGNVFSCSVMHEALHNHYTQKSLSLSPGK | |
| EPB08 HC | QVQLLESGGGLVQPGGSLRLSCAASGFTFSSYTMSWVRQAPGQCLEWMGTISSGGTYTY | 125 |
| | YPDSVKGRFTISRDNAKNSLYLQMNSLRAEDTAVYYCAREAIFTYWGRGTLVTVSSAST | |
| | KGPSVFPLAPEVQLLESGGGLVQPGGSLRLSCAASGFTFSHYMMAWVRQAPGKCLEWVS | |
| | SISPSGGVTLYADSVKGRFTISRDNSKNTLYLQMNSLRAEDTAVYYCTRELLGTVVVPV | |
| | AWKMRGYFDYWGQLTLVTVSSASTKGPSVFPLAPSSKSTSGGTAALGCLVKDYFPEPVT | |
| | VSWNSGALTSGVHTFPAVLQSSGLYSLSSVVTVPSSSLGTQTYICNVNHKPSNTKVDKK | |
| | VEPKSCDKTHTCPPCPAPELLGGPSVFLFPPKPKDTLMISRTPEVTCVVVDVSHEDPEV | |
| | KFNWYVDGVEVHNAKTKPREEQYNSTYRVVSVLTVLHQDWLNGKEYKCKVSNKALPAPI | |
| | EKTISKAKGQPREPQVYTLPPCREEMTKNQVSLWCLVKGFYPSDIAVEWESNGQPENNY | |
| | KTTPPVLDSDGSFFLYSKLTVDKSRWQQGNVFSCSVMHEALHNHYTQKSLSLSPGK | |
| EPB08 LC | DIQMTQSPGTLSVSPGERVTLSCKASQDINNYLSWYQQKPDQAPKLLIKRANRLVDGVP | 126 |
| | DRFSGSGSGTDFTLKISRVEAEDVGVYYCLKYDEFPYTFGQGTRLEIKRTVAAPSVFIF | |
| | PPDIQMTQSPGTLSVSPGERATLSCRASQSVSSNLAWYQQKPGKAPKLLIYGASTRATG | |
| | IPARFSGSGSGTEFTLTISSMQSEDFAVYYCQQYNNWPPLTFGCGTKVEIKRTVAAPSV | |
| | FIFPPSDEQLKSGTASVVCLLNNFYPREAKVQWKVDNALQSGNSQESVTEQDSKDSTYS | |
| | LSSTLTLSKADYEKHKVYACEVTHQGLSSPVTKSFNRGECGGGGSGGGGSGGGGSEPKS | |
| | SDKTHTCPPCPAPELLGGPSVFLFPPKPKDTLMISRTPEVTCVVVDVSHEDPEVKFNWY | |
| | VDGVEVHNAKTKPREEQYNSTYRVVSVLTVLHQDWLNGKEYKCKVSNKALPAPIEKTIS | |
| | KAKGQPREPQVYTLPPCREEMTKNQVSLWCLVKGFYPSDIAVEWESNGQPENNYKTTPP | |
| | VLDSDGSFFLYSKLTVDKSRWQQGNVFSCSVMHEALHNHYTQKSLSLSPGK | |
| EPB09 HC | EVQLLESGGGLVQPGGSLRLSCAASGFTFSRYQMMWVRQAPGKGLEWVSSISPSGGVTL | 127 |
| | YADSVKGRFTISRDNSKNTLYLQMNSLRAEDTAVYYCTRELLGTVVVPVAWKMRGYFDY | |
| | WGQLTLVTVSSASTKGPSVFPLAPEVQLVESGGGVVRPGGSLRLSCAASGFTVSDYSMN | |
| | WVRQAPGKCLEWIGFIRNKANAYTTEYSASVKGRFTISRDDSKNTLYLQMNSLKTEDTA | |
| | VYYCTTYPRYHAMDSWGQGTMVTVSSASTKGPSVFPLAPSSKSTSGGTAALGCLVKDYF | |
| | PEPVTVSWNSGALTSGVHTFPAVLQSSGLYSLSSVVTVPSSSLGTQTYICNVNHKPSNT | |
| | KVDKKVEPKSCDKTHTCPPCPAPELLGGPSVFLFPPKPKDTLMISRTPEVTCVVVDVSH | |
| | EDPEVKFNWYVDGVEVHNAKTKPREEQYNSTYRVVSLVTVLHQDWLNGKEYKCKVSNKA | |
| | LPAPIEKTISKAKGQPREPQVYTLPPCREEMTKNQVSLWCLVKGFYPSDIAVEWESNGQ | |
| | PENNYKTTPPVLDSDGSFFLYSKLTVDKSRWQQGNVFSCSVMHEALHNHYTQKSLSLSP | |
| | GK | |
| EPB09 LC | DIQMTQSPGTLSVSPGERATLSCRASQSVSSNLAWYQQKPGQAPRLLIYGASTRATGIP | 128 |
| | ARFSGSGSGTEFTLTISSMQSEDFAVYYCQQYNNWPPLTFGGGTKVEIKRTVAAPSVFI | |
| | FPPDIQLTQSPSSLSASVGDRVTITCRASQSISNNLHWYLQKPGQSPSLLIYYGFQSIS | |
| | GVPSRFSGSGSGTDFSLTISSLQPEDFATYYCQQANSWPLTFGCGTKVEIKRTVAAPSV | |
| | FIFPPSDEQLKSGTASVVCLLNNFYPREAKVQWKVDNALQSGNSQESVTEQDSKDSTYS | |
| | LSSTLTLSKADYEKHKVYACEVTHQGLSSPVTKSFNRGECGGGGSGGGGSGGGGSEPKS | |
| | SDKTHTCPPCPAPELLGGPSVFLFPPLPKDTLMISRTPEVTCVVVDVSHEDPEVKFNWY | |
| | VDGVEVHNAKTKPREEQYNSTYRVVSVLTVLHQDWLNGKEYKCKVSNKALPAPIEKTIS | |
| | KAKGQPREPQVYTLPPCREEMTKNQVSLWCLVKGFYPSDIAVEWESNGQPENNYKTTPP | |
| | VLDSDGSFFLYSKLTVDKSRWQQGNVFSCSVMHEALHNHYTQKSLSLSPGK | |
| EPB10 HC | QVQLLESGGGLVQPGGSLRLSCAASGFTFSSYTMSWVRQAPGQCLEWMGTISSGGTYTY | 129 |
| | YPDSVKGRFTISRDNAKNSLYLQMNSLRAEDTAVYYCAREAIFTYWGRGTLVTVSSAST | |
| | KGPSVFPLAPEVQLVESGGGVVRPGGSLRLSCAASGFTVSDYSMNWVRQAPGKGLEWIG | |
| | FIRNKANAYTTEYSASVKGRFTISRDDSKNTLYLQMNSLKTEDTAVYYCTTYPRYHAMD | |
| | SWGQGTMVTVSSASTKGPSVFPLAPSSKSTSGGTAALGCLVKDYFPEPVTVSWNSGALT | |
| | SGVHTFPAVLQSSGLYSLSSVVTVPSSSLGTQTYICNVNHKPSNTKVDKKVEPKSCDKT | |
| | HTCPPCPAPELLGGPSVFLFPPKPKDTLMISRTPEVTCVVVDVSHEDPEVKFNWYVDGV | |
| | EVHNAKTKPREEQYNSTYRVVSVLTVLHQDWLNGKEYKCKVSNKALPAPIEKTISKAKG | |
| | QPREPQVYTLPPCREEMTKNQVSLWCLVKGFYPSDIAVEWESNGQPENNYKTTPPVLDS | |
| | DGSFFLYSKLTVDKSRWQQGNVFSCSVMHEALHNHYTQKSLSLSPGK | |
| EPB10 LC | DIQLTQSPSSLSLSPGERVTLSCKASQDINNYLSWYQQKPDQAPKLLIKRANRLVDGVP | 130 |
| | DRFSGSGSGTDFTLKISRVEAEDVGVYYCLKYDEFPYTFGQGTRLEIKRTVAAPSVFIF | |
| | PPAIQLTQSPSSLSASVGDRVTITCRASQSISNNLHWYLQKPGQSPSLLIYYGFQSISG | |
| | VPSRFSGSGSGTDFTLTISSLQPEDFATYYCQQANSWPLTFGCGTKLEIKRTVAAPSVF | |
| | IFPPSDEQLKSGTASVVCLLNNFYPREAKVQWKVDNALQSGNSQESVTEQDSKDSTYSL | |
| | SSTLTLSKADYEKHKVYACEVTHQGLSSPVTKSFNRGECGGGGSGGGGSGGGGSEPKSS | |
| | DKTHTCPPCPAPELLGGPSVFLFPPLPKDTLMISRTPEVTCVVVDVSHEDPEVKFNWYV | |
| | DGVEVHNAKTKPREEQYNSTYRVVSVLTVLHQDWLNGKEYKCKVSNKALPAPIEKTISK | |
| | AKGQPREPQVYTLPPCREEMTKNQVSLWCLVKGFYPSDIAVEWESNGQPENNYKTTPPV | |
| | LDSDGSFFLYSKLTVDKSRWQQGNVFSCSVMHEALHNHYTQKSLSLSPGK | |
| EPB11 HC | EVQLLESGGGLVQPGGSLRLSCAASGFTFSRYQMMWVRQAPGKGLEWVSSISPSGGVTL | 131 |
| | YADSVKGRFTISRDNSKNTLYLQMNSLRAEDTAVYYCTRELLGTVVVPVAWKMRGYFDY | |
| | WGQGTMVTVSSASTKGPSVFPLAPEVQLLESGGGLVQPGGSLRLSCAASGFTFSSYTMS | |
| | WVRQAPGQCLEWMGTISSGGTYTYYPDSVKGRFTISRDNAKNSLYLQMNSLRAEDTAVY | |
| | YCAREAIFTYWGRGTLVTVSSASTKGPSVFPLAPSSKSTSGGTAALGCLVKDYFPEPVT | |
| | VSWNSGALTSGVHTFPAVLQSSGLYSLSSVVTVPSSSLGTQTYICNVNHKPSNTKVDKK | |
| | VEPKSCDKTHTCPPCPAPELLGGPSVFLFPPKPKDTLMISRTPEVTCVVVDVSHEDPEV | |
| | KFNWYVDGVEVHNAKTKPREEQYNSTYRVVSVLTVLHQDWLNGKEYKCKVSNKALPAPI | |
| | EKTISKAKGQPREPQVYTLPPCREEMTKNQVSLWCLVKGFYPSDIAVEWESNGQPENNY | |
| | KTTPPVLDSDGSFFLYSKLTVDKSRWQQGNVFSCSVMHEALHNHYTQKSLSLSPGK | |
| EPB11 LC | DIQMTQSPGTLSVSPGERATLSCRASQSVSSNLAWYQQKPGQAPRLLIYGASTRATGIP | 132 |
| | ARFSGSGSGTEFTLTISSMQSEDFAVYYCQQYNNWPPLTFGGGTKVEIKRTVAAPSVFI | |
| | FPPDIQLTQSPSSLSLSPGERVTLSCKASQDINNYLSWYQQKPDQAPKLLIKRANRLVD | |
| | GVPSRFSGSGSGTEFSLTISGLQPDDFATYYCQQYNSYSRTFGCGTKVEIKRTVAAPSV | |
| | FIFPPSDEQLKSGTASVVCLLNNFYPREAKVQWKVDNALQSGNSQESVTEQDSKDSTYS | |
| | LSSTLTLSKADYEKHKVYACEVTHQGLSSPVTKSFNRGECGGGGSGGGGSGGGGSEPKS | |
| | SDKTHTCPPCPAPELLGGPSVFLFPPLPKDTLMISRTPEVTCVVVDVSHEDPEVKFNWY | |
| | VDGVEVHNAKTKPREEQYNSTYRVVSVLTVLHQDWLNGKEYKCKVSNKALPAPIEKTIS | |
| | KAKGQPREPQVYTLPPCREEMTKNQVSLWCLVKGFYPSDIAVEWESNGQPENNYKTTPP | |
| | VLDSDGSFFLYSKLTVDKSRWQQGNVFSCSVMHEALHNHYTQKSLSLSPGK | |
| EPB12 HC | EVQLVESGGGVVRPGGSLRLSCAASGFTVSDYSMNWVRQAPGKGLEWIGFIRNKANAYT | 133 |
| | TEYSASVKGRFTISRDDSKNTLYLQMNSLKTEDTAVYYCTTYPRYHAMDSWGQGTMVTV | |
| | SSASTKGPSVFPLAPEVQLLESGGGLVQPGGSLRLSCAASGFTFSSYTMSWVRQAPGQC | |
| | LEWMGTISSGGTYTYYPDSVKGRFTISRDNAKNSLYLQMNSLRAEDTAVYYCAREAIFT | |
| | YWGRGTLVTVSSASTKGPSVFPLAPSSKSTSGGTAALGCLVKDYFPEPVTVSWNSGALT | |
| | SGVHTFPAVLQSSGLYSLSSVVTVPSSSLGTQTYICNVNHKPSNTKVDKKVEPKSCDKT | |
| | HTCPPCPAPELLGGPSVFLFPPKPKDTLMISRTPEVTCVVVDVSHEDPEVKFNWYVDGV | |
| | EVHNAKTKPREEQYNSTYRVVSVLTVLHQDWLNGKEYKCKVSNKALPAPIEKTISKAKG | |
| | QPREPQVYTLPPCREEMTKNQVSLWCLVKGFYPSDIAVEWESNGQPENNYKTTPPVLDS | |
| | DGSFFLYSKLTVDKSRWQQGNVFSCSVMHEALHNHYTQKSLSLSPGK | |
| EPB12 LC | AIQLTQSPSSLSASVGDRVTITCRASQSISNNLHWYLQKPGQSPSLLIYYGFQSISGVP | 134 |
| | SRFSGSGSGTDFTLTISSLQPEDFATYYCQQANSWPLTFGGGTKLEIKRTVAAPSVFIF | |
| | FPDIQMTQSPSSLSASVGDRVTITCRASQSISTWLAWYQQKPGKAPKLLIYKASNLHTG | |
| | VPSRFSGSGSGTEFSLTISGLQPDDFATYYCQQYNSYSRTFGCGTKVEIKRTVAAPSVF | |
| | IFPPSDEQLKSGTASVVCLLNNFYPREAKVQWKVDNALQSGNSQESVTEQDSKDSTYSL | |
| | SSTLTLSKADYEKHKVYACEVTHQGLSSPVTKSFNRGECGGGGSGGGGSGGGGSEPKSS | |
| | DKTHTCPPCPAPELLGGPSVFLFPPKPKDTLMISRTPEVTCVVVDVSHEDPEVKFNWYV | |
| | DGVEVHNAKTKPREEQYNSTYRVVSVLTVLHQDWLNGKEYKCKVSNKALPAPIEKTISK | |
| | AKGQPREPQVYTLPPCREEMTKNQVSLWCLVKGFYPSDIAVEWESNGQPENNYKTTPPV | |
| | LDSDGSFFLYSKLTVDKSRWQQGNVFSCSVMHEALHNHYTQKSLSLSPGK | |

TABLE 51

| Name | Sequence | SEQ ID NO |
|---|---|---|
| EPB01 HC | GAGGTGCAACTGCTTGAGTCAGGAGGAGGACTGGTTCAACCCGGCGGGAGCCTTCGACT | 528 |
| | CTCATGTGCAGCCTCTGGGTTTACATTTAGTCGTTACCAAATGATGTGGGTACGCCAGG | |
| | CCCCCGGAAAAGGTTTGGAGTGGGTGAGCAGCATTTCTCCTTCAGGAGGAGTGACACTT | |
| | TACGCAGACAGTGTTAAGGGTCGGTTCACAATCAGTCGTGATAATTCCAAGAACACTCT | |
| | CTATCTCCAAATGAACTCCCTTCGAGCTGAGGACACTGCTGTTTATTACTGTACTCGGG | |
| | AACTTCTCGGCACTGTGGTTGTTCCTGTGGCTTGGAAGATGCGTGGATACTTCGACTAT | |
| | TGGGGGCAACTCACTCTTGTTACCGTCTCAAGCGCTAGCACCAAAGGACCTAGTGTTTT | |
| | TCCTCTTGCCCCTGAGGTTCAACTCCTTGAATCCGGAGGAGGACTTGTCCAACCAGGCG | |
| | GCAGCCTTAGGCTGTCCTGCGCTGCCTCAGGCTTTACATTCAGTCATTACATGATGGCC | |
| | TGGGTTAGACAGGCACCCGGCAAATGTCTGGAATGGGTCAGCCGAATAGGACCATCAGG | |
| | AGGTCCCACTCACTATGCCGATTCTGTAAAAGGGAGGTTTACAATTTCCAGAGACAATT | |
| | CAAAGAATACCCTTTACCTCCAGATGAACTCATTGAGAGCCGAGGACACAGCCGTATAT | |
| | TATTGCGCAGGTTATGATTCCGGTTACGATTACGTTGCAGTCGCAGGCCCAGCCGAATA | |
| | CTTCCAACATTGGGGTCAGGGAACCCTCGTGACCGTGTCCAGTGCTAGCACCAAAGGAC | |
| | CTAGTGTTTTTCCTCTTGCCCCTTCCTCAAAGTCTACCTCTGGGGGGACAGCCGCTCTG | |
| | GGCTGCCTGGTCAAGGATTATTTCCCAGAGCCTGTCACTGTCAGTTGGAACTCTGGAGC | |
| | CTTGACTTCTGGTGTTCATACATTTCCTGCTGTCCTTCAAAGCAGCGGCTTGTACTCAT | |
| | TGTCTTCTGTTGTGACAGTACCCTCAAGCAGCCTCGGCACTCAGACATACATCTGCAAT | |
| | GTCAACCACAAACCCTCAAATACAAAGGTAGATAAAAAAGTCGAACCAAAGTCTTGTGA | |
| | CAAAACTCACACGTGCCCACCGTGCCCAGCACCTGAACTCCTGGGGGGACCGTCAGTCT | |
| | TCCTCTTCCCCCCAAAACCCAAGGACACCCTCATGATCTCCCGGACCCCTGAGGTCACA | |
| | TGCGTGGTGGTGGACGTGAGCCACGAAGACCCTGAGGTCAAGTTCAACTGGTACGTGGA | |
| | CGGCGTGGAGGTGCATAATGCCAAGACAAAGCCGCGGGAGGAGCAGTACAACAGCACGT | |
| | ACCGTGTGGTCAGCGTCCTCACCGTCCTGCACCAGGACTGGCTGAATGGCAAGGAGTAC | |
| | AAGTGCAAGGTCTCCAACAAAGCCCTCCCAGCCCCCATCGAGAAAACCATCTCCAAAGC | |
| | CAAAGGGCAGCCCCGAGAACCACAGGTGTACACCCTGCCCCCATGCCGGGAGGAGATGA | |
| | CCAAGAACCAGGTCAGCCTGTGGTGCCTGGTCAAAGGCTTCTATCCCAGCGACATCGCC | |
| | GTGGAGTGGGAGAGCAATGGGCAGCCGGAGAACAACTACAAGACCACGCCTCCCGTGCT | |
| | GGACTCCGACGGCTCCTTCTTCCTCTACAGCAAGCTCACCGTGGACAAGAGCAGGTGGC | |
| | AGCAGGGGAACGTCTTCTCATGCTCCGTGATGCATGAGGCTCTGCACAACCACTACACG | |
| | CAGAAGAGCCTCTCCCTGTCTCCGGGTAAA | |
| EPB01 LC | GACATACAGATGACTCAGAGCCCTGGTACACTGAGTGTATCTCCTGGGGAACGCGCCAC | 529 |
| | TCTGTCTTGCCGAGCCTCTCAAAGCGTTAGTTCCAACCTGGCTTGGTATCAGCAAAAAC | |
| | CCGGTCAAGCACCTCGCTTGCTTATCTACGGGGCCTCCACACGGGCAACCGGCATTCCT | |
| | GCACGCTTTAGTGGCTCTGGTAGCGGGACTGAATTCACTTTGACTATATCTTCCATGCA | |
| | GAGTGAGGATTTCGCCGTTTATTATTGTCAACAGTACAATAACTGGCCTCCACTCACTT | |
| | TTGGTGGTGGCACCAAAGTGGAGATAAAGCGTACGGTGGCAGCTCCCAGCGTTTTTATC | |
| | TTTCCCCCAGACATACAGATGACACAAAGTCCAAGTAGCCTTTCTGCATCCGTTGGAGA | |
| | CCGCGTAACCATAACTTGTCGAGCATCACAAAGCATAAGCACTTGGCTTGCTTGGTATC | |
| | AGCAGAAGCCAGGCAAAGCACCCAAGCTGCTGATTTATAAAGCCTCTAATCTCCATACA | |
| | GGAGTTCCCAGCCGTTTCTCAGGCAGCGGGTCTGGAACCGAATTCTCTCTGACCATCTC | |
| | TGGCTTGCAACCTGATGACTTTGCAACATATTACTGTCAACAATATAATTCATATAGTC | |
| | GTACTTTCGGGTGTGGCACTAAGGTGGAAATCAAACGTACGGTGGCAGCTCCCAGCGTT | |
| | TTTATCTTTCCCCCATCCGACGAGCAGCTCAAGAGTGGCACTGCCTCTGTAGTTTGTTT | |
| | GCTGAATAACTTCTATCCACGTGAAGCAAAAGTACAGTGGAAGGTCGATAATGCCCTTC | |
| | AGAGCGGTAACAGCCAAGAAAGTGTTACCGAGCAAGATTCCAAAGATTCCACTTACAGT | |
| | CTGTCCAGCACATTGACACTGAGTAAGGCTGATTACGAAAAACACAAGGTGTACGCATG | |
| | CGAGGTGACACACCAAGGTCTTTCATCTCCTGTAACTAAGAGCTTTAACCGGGGAGAAT | |
| | GTGGTGGTGGGGGCAGCGGGGGCGGAGGTAGTGGAGGCGGCGGTAGTGAACCAAAGAGT | |
| | AGTGACAAAACTCACACGTGCCCACCGTGCCCAGCACCTGAACTCCTGGGGGGACCGTC | |
| | AGTCTTCCTCTTCCCCCCAAAACCCAAGGACACCCTCATGATCTCCCGGACCCCTGAGG | |
| | TCACATGCGTGGTGGTGGACGTGAGCCACGAAGACCCTGAGGTCAAGTTCAACTGGTAC | |
| | GTGGACGGCGTGGAGGTGCATAATGCCAAGACAAAGCCGCGGGAGGAGCAGTACAACAG | |
| | CACGTACCGTGTGGTCAGCGTCCTCACCGTCCTGCACCAGGACTGGCTGAATGGCAAGG | |
| | AGTACAAGTGCAAGGTCTCCAACAAAGCCCTCCCAGCCCCCATCGAGAAAACCATCTCC | |
| | AAAGCCAAAGGGCAGCCCCGAGAACCACAGGTGTACACCCTGCCCCCATGCCGGGAGGA | |
| | GATGACCAAGAACCAGGTCAGCCTGTGGTGCCTGGTCAAAGGCTTCTATCCCAGCGACA | |
| | TCGCCGTGGAGTGGGAGAGCAATGGGCAGCCGGAGAACAACTACAAGACCACGCCTCCC | |
| | GTGCTGGACTCCGACGGCTCCTTCTTCCTCTACAGCAAGCTCACCGTGGACAAGAGCAG | |
| | GTGGCAGCAGGGGAACGTCTTCTCATGCTCCGTGATGCATGAGGCTCTGCACAACCACT | |
| | ACACGCAGAAGAGCCTCTCCCTGTCTCCGGGTAAA | |
| EPB02 HC | GAGGTCCAGCTGGTTGAGTCTGGAGGTGGTGTAGTCAGGCCAGGAGGTTCCCTGCGTCT | 530 |
| | GTCTTGCGCTGCCTCTGGGTTCACTGTGTCTGACTACAGTATGAACTGGGTTAGACAGG | |
| | CTCCAGGGAAAGGTTTGGAATGGATAGGGTTTATTCGCAATAAAGCCAATGCCTATACC | |
| | ACCGAATACAGCGCAAGCGTTAAAGGCAGGTTCACCATCAGTAGGGACGACTCTAAGAA | |
| | TACCCTCTACCTGCAGATGAATAGCTTGAAGACAGAGGATACCGCTGTTTATTACTGCA | |
| | CTACCTACCCCAGGTATCATGCTATGGACAGTTGGGGTCAAGGAACTATGGTCACCGTC | |
| | TCCTCTGCTAGCACCAAAGGACCTAGTGTTTTTCCTCTTGCCCCTGAGGTTCAACTCCT | |
| | TGAATCCGGAGGAGGACTTGTCCAACCAGGCGGCAGCCTTAGGCTGTCCTGCGCTGCCT | |
| | CAGGCTTTACATTCAGTCATTACATGATGGCCTGGGTTAGACAGGCACCCGGCAAATGT | |
| | CTGGAATGGGTCAGCCGAATAGGACCATCAGGAGGTCCCACTCACTATGCCGATTCTGT | |
| | AAAAGGGAGGTTTACAATTTCCAGAGACAATTCAAAGAATACCCTTTACCTCCAGATGA | |
| | ACTCATTGAGAGCCGAGGACACAGCCGTATATTATTGCGCAGGTTATGATTCCGGTTAC | |
| | GATTACGTTGCAGTCGCAGGCCCAGCCGAATACTTCCAACATTGGGGTCAGGGAACCCT | |
| | CGTGACCGTGTCCAGTGCTAGCACCAAAGGACCTAGTGTTTTTCCTCTTGCCCCTTCCT | |
| | CAAAGTCTACCTCTGGGGGGACAGCCGCTCTGGGCTGCCTGGTCAAGGATTATTTCCCA | |
| | GAGCCTGTCACTGTCAGTTGGAACTCTGGAGCCTTGACTTCTGGTGTTCATACATTTCC | |
| | TGCTGTCCTTCAAAGCAGCGGCTTGTACTCATTGTCTTCTGTTGTGACAGTACCCTCAA | |
| | GCAGCCTCGGCACTCAGACATACATCTGCAATGTCAACCACAAACCCTCAAATACAAAG | |
| | GTAGATAAAAAAGTCGAACCAAAGTCTTGTGACAAAACTCACACGTGCCCACCGTGCCC | |
| | AGCACCTGAACTCCTGGGGGGACCGTCAGTCTTCCTCTTCCCCCCAAAACCCAAGGACA | |
| | CCCTCATGATCTCCCGGACCCCTGAGGTCACATGCGTGGTGGTGGACGTGAGCCACGAA | |
| | GACCCTGAGGTCAAGTTCAACTGGTACGTGGACGGCGTGGAGGTGCATAATGCCAAGAC | |
| | AAAGCCGCGGGAGGAGCAGTACAACAGCACGTACCGTGTGGTCAGCGTCCTCACCGTCC | |
| | TGCACCAGGACTGGCTGAATGGCAAGGAGTACAAGTGCAAGGTCTCCAACAAAGCCCTC | |
| | CCAGCCCCCATCGAGAAAACCATCTCCAAAGCCAAAGGGCAGCCCCGAGAACCACAGGT | |
| | GTACACCCTGCCCCCATGCCGGGAGGAGATGACCAAGAACCAGGTCAGCCTGTGGTGCC | |
| | TGGTCAAAGGCTTCTATCCCAGCGACATCGCCGTGGAGTGGGAGAGCAATGGGCAGCCG | |
| | GAGAACAACTACAAGACCACGCCTCCCGTGCTGGACTCCGACGGCTCCTTCTTCCTCTA | |
| | CAGCAAGCTCACCGTGGACAAGAGCAGGTGGCAGCAGGGGAACGTCTTCTCATGCTCCG | |
| | TGATGCATGAGGCTCTGCACAACCACTACACGCAGAAGAGCCTCTCCCTGTCTCCGGGT | |
| | AAA | |
| EPB02 LC | GCCATACAGCTGACTCAATCACCTTCTTCTTTGAGCGCCTCTGTCGGTGATCGCGTTAC | 531 |
| | AATTACATGCCGAGCTTCTCAGTCTATCTCTAATAACCTCCACTGGTATCTCCAGAAAC | |
| | CTGGACAGTCACCACAGCTTCTGATATATTACGGCTTTCAGTCTATAAGTGGAGTCCCA | |
| | AGTAGATTTTCCGGTAGTGGATCTGGCACCGATTTTACTCTTACTATCTCTAGCCTCCA | |
| | ACCTGAAGATTTCGCAACCTATTACTGCCAGCAGGCCAATTCCTGGCCCTTGACCTTCG | |
| | GAGGTGGGACTAAGCTGGAAATCAAACGTACGGTGGCAGCTCCCAGCGTTTTTATCTTT | |
| | CCCCCAGACATACAGATGACACAAAGTCCAAGTAGCCTTTCTGCATCCGTTGGAGACCG | |
| | CGTAACCATAACTTGTCGAGCATCACAAAGCATAAGCACTTGGCTTGCTTGGTATCAGC | |
| | AGAAGCCAGGCAAAGCACCCAAGCTGCTGATTTATAAAGCCTCTAATCTCCATACAGGA | |
| | GTTCCCAGCCGTTTCTCAGGCAGCGGGTCTGGAACCGAATTCTCTCTGACCATCTCTGG | |
| | CTTGCAACCTGATGACTTTGCAACATATTACTGTCAACAATATAATTCATATAGTCGTA | |
| | CTTTCGGGTGTGGCACTAAGGTGGAAATCAAACGTACGGTGGCAGCTCCCAGCGTTTTT | |
| | ATCTTTCCCCCATCCGACGAGCAGCTCAAGAGTGGCACTGCCTCTGTAGTTTGTTTGCT | |
| | GAATAACTTCTATCCACGTGAAGCAAAAGTACAGTGGAAGGTCGATAATGCCCTTCAGA | |
| | GCGGTAACAGCCAAGAAAGTGTTACCGAGCAAGATTCCAAAGATTCCACTTACAGTCTG | |
| | TCCAGCACATTGACACTGAGTAAGGCTGATTACGAAAAACACAAGGTGTACGCATGCGA | |
| | GGTGACACACCAAGGTCTTTCATCTCCTGTAACTAAGAGCTTTAACCGGGGAGAATGTG | |
| | GTGGTGGGGGCAGCGGGGGCGGAGGTAGTGGAGGCGGCGGTAGTGAACCAAAGAGTAGT | |
| | GACAAAACTCACACGTGCCCACCGTGCCCAGCACCTGAACTCCTGGGGGGACCGTCAGT | |
| | CTTCCTCTTCCCCCCAAAACCCAAGGACACCCTCATGATCTCCCGGACCCCTGAGGTCA | |
| | CATGCGTGGTGGTGGACGTGAGCCACGAAGACCCTGAGGTCAAGTTCAACTGGTACGTG | |
| | GACGGCGTGGAGGTGCATAATGCCAAGACAAAGCCGCGGGAGGAGCAGTACAACAGCAC | |
| | GTACCGTGTGGTCAGCGTCCTCACCGTCCTGCACCAGGACTGGCTGAATGGCAAGGAGT | |
| | ACAAGTGCAAGGTCTCCAACAAAGCCCTCCCAGCCCCCATCGAGAAAACCATCTCCAAA | |
| | GCCAAAGGGCAGCCCCGAGAACCACAGGTGTACACCCTGCCCCCATGCCGGGAGGAGAT | |
| | GACCAAGAACCAGGTCAGCCTGTGGTGCCTGGTCAAAGGCTTCTATCCCAGCGACATCG | |
| | CCGTGGAGTGGGAGAGCAATGGGCAGCCGGAGAACAACTACAAGACCACGCCTCCCGTG | |
| | CTGGACTCCGACGGCTCCTTCTTCCTCTACAGCAAGCTCACCGTGGACAAGAGCAGGTG | |
| | GCAGCAGGGGAACGTCTTCTCATGCTCCGTGATGCATGAGGCTCTGCACAACCACTACA | |
| | CGCAGAAGAGCCTCTCCCTGTCTCCGGGTAAA | |
| EPB03 HC | CAAGTGCAACTCCTTGAAAGTGGAGGTGGCCTTGTCCAGCCAGGCGGTTCACTGCGTTT | 532 |
| | GAGCTGTGCCGCATCCGGCTTTACCTTTTCCAGTTACACAATGAGTTGGGTCCGTCAAG | |
| | CACCCGGGCAAGCTTTGGAATGGATGGGAACTATTTCATCTGGTGGGACTTACACTTAC | |
| | TATCCCGATAGCGTCAAGGGACGTTTTACCATAAGCCGGGACAACGCTAAAAATTCACT | |
| | CTATCTTCAGATGAACAGTCTTAGGGCTGAGGATACCGCTGTTTATTATTGCGCCCGAG | |
| | AAGCCATTTTCACCTACTGGGGGCGCGGTACACTTGTCACCGTTAGCAGTGCTAGCACC | |
| | AAAGGACCTAGTGTTTTTCCTCTTGCCCCTGAGGTTCAACTCCTTGAATCCGGAGGAGG | |
| | ACTTGTCCAACCAGGCGGCAGCCTTAGGCTGTCCTGCGCTGCCTCAGGCTTTACATTCA | |
| | GTCATTACATGATGGCCTGGGTTAGACAGGCACCCGGCAAATGTCTGGAATGGGTCAGC | |
| | CGAATAGGACCATCAGGAGGTCCCACTCACTATGCCGATTCTGTAAAAGGGAGGTTTAC | |
| | AATTTCCAGAGACAATTCAAAGAATACCCTTTACCTCCAGATGAACTCATTGAGAGCCG | |
| | AGGACACAGCCGTATATTATTGCGCAGGTTATGATTCCGGTTACGATTACGTTGCAGTC | |
| | GCAGGCCCAGCCGAATACTTCCAACATTGGGGTCAGGGAACCCTCGTGACCGTGTCCAG | |
| | TGCTAGCACCAAAGGACCTAGTGTTTTTCCTCTTGCCCCTTCCTCAAAGTCTACCTCTG | |
| | GGGGGACAGCCGCTCTGGGCTGCCTGGTCAAGGATTATTTCCCAGAGCCTGTCACTGTC | |
| | AGTTGGAACTCTGGAGCCTTGACTTCTGGTGTTCATACATTTCCTGCTGTCCTTCAAAG | |
| | CAGCGGCTTGTACTCATTGTCTTCTGTTGTGACAGTACCCTCAAGCAGCCTCGGCACTC | |
| | AGACATACATCTGCAATGTCAACCACAAACCCTCAAATACAAAGGTAGATAAAAAAGTC | |
| | GAACCAAAGTCTTGTGACAAAACTCACACGTGCCCACCGTGCCCAGCACCTGAACTCCT | |
| | GGGGGGACCGTCAGTCTTCCTCTTCCCCCCAAAACCCAAGGACACCCTCATGATCTCCC | |
| | GGACCCCTGAGGTCACATGCGTGGTGGTGGACGTGAGCCACGAAGACCCTGAGGTCAAG | |
| | TTCAACTGGTACGTGGACGGCGTGGAGGTGCATAATGCCAAGACAAAGCCGCGGGAGGA | |
| | GCAGTACAACAGCACGTACCGTGTGGTCAGCGTCCTCACCGTCCTGCACCAGGACTGGC | |
| | TGAATGGCAAGGAGTACAAGTGCAAGGTCTCCAACAAAGCCCTCCCAGCCCCCATCGAG | |
| | AAAACCATCTCCAAAGCCAAAGGGCAGCCCCGAGAACCACAGGTGTACACCCTGCCCCC | |
| | ATGCCGGGAGGAGATGACCAAGAACCAGGTCAGCCTGTGGTGCCTGGTCAAAGGCTTCT | |
| | ATCCCAGCGACATCGCCGTGGAGTGGGAGAGCAATGGGCAGCCGGAGAACAACTACAAG | |
| | ACCACGCCTCCCGTGCTGGACTCCGACGGCTCCTTCTTCCTCTACAGCAAGCTCACCGT | |
| | GGACAAGAGCAGGTGGCAGCAGGGGAACGTCTTCTCATGCTCCGTGATGCATGAGGCTC | |
| | TGCACAACCACTACACGCAGAAGAGCCTCTCCCTGTCTCCGGGTAAA | |
| EPB03 LC | GACATACAACTCACACAAAGTCCAAGCTCTCTTTCCCTTAGTCCAGGAGAACGCGTAAC | 533 |
| | TCTCTCATGTAAAGCCTCCCAGGATATCAATAACTATCTCTCTTGGTACCAACAAAAGC | |
| | CTGACCAAGCTCCTAAGCTGCTTATCAAACGCGCCAATCGGTTGGTAGACGGAGTTCCC | |
| | GACAGGTTCAGTGGGTCAGGCTCAGGTACAGATTTTACCTTGAAGATATCACGCGTGGA | |
| | AGCCGAAGACGTAGGGGTATATTATTGTCTGAAATATGACGAGTTCCCCTATACTTTTG | |
| | GGCAAGGAACTCGCCTGGAAATAAAACGTACGGTGGCAGCTCCCAGCGTTTTTATCTTT | |
| | CCCCCAGACATACAGATGACACAAAGTCCAAGTAGCCTTTCTGCATCCGTTGGAGACCG | |
| | CGTAACCATAACTTGTCGAGCATCACAAAGCATAAGCACTTGGCTTGCTTGGTATCAGC | |
| | AGAAGCCAGGCAAAGCACCCAAGCTGCTGATTTATAAAGCCTCTAATCTCCATACAGGA | |
| | GTTCCCAGCCGTTTCTCAGGCAGCGGGTCTGGAACCGAATTCTCTCTGACCATCTCTGG | |
| | CTTGCAACCTGATGACTTTGCAACATATTACTGTCAACAATATAATTCATATAGTCGTA | |
| | CTTTCGGGTGTGGCACTAAGGTGGAAATCAAACGTACGGTGGCAGCTCCCAGCGTTTTT | |
| | ATCTTTCCCCCATCCGACGAGCAGCTCAAGAGTGGCACTGCCTCTGTAGTTTGTTTGCT | |
| | GAATAACTTCTATCCACGTGAAGCAAAAGTACAGTGGAAGGTCGATAATGCCCTTCAGA | |
| | GCGGTAACAGCCAAGAAAGTGTTACCGAGCAAGATTCCAAAGATTCCACTTACAGTCTG | |
| | TCCAGCACATTGACACTGAGTAAGGCTGATTACGAAAAACACAAGGTGTACGCATGCGA | |
| | GGTGACACACCAAGGTCTTTCATCTCCTGTAACTAAGAGCTTTAACCGGGGAGAATGTG | |
| | GTGGTGGGGGCAGCGGGGGCGGAGGTAGTGGAGGCGGCGGTAGTGAACCAAAGAGTAGT | |
| | GACAAAACTCACACGTGCCCACCGTGCCCAGCACCTGAACTCCTGGGGGGACCGTCAGT | |
| | CTTCCTCTTCCCCCCAAAACCCAAGGACACCCTCATGATCTCCCGGACCCCTGAGGTCA | |
| | CATGCGTGGTGGTGGACGTGAGCCACGAAGACCCTGAGGTCAAGTTCAACTGGTACGTG | |
| | GACGGCGTGGAGGTGCATAATGCCAAGACAAAGCCGCGGGAGGAGCAGTACAACAGCAC | |
| | GTACCGTGTGGTCAGCGTCCTCACCGTCCTGCACCAGGACTGGCTGAATGGCAAGGAGT | |
| | ACAAGTGCAAGGTCTCCAACAAAGCCCTCCCAGCCCCCATCGAGAAAACCATCTCCAAA | |
| | GCCAAAGGGCAGCCCCGAGAACCACAGGTGTACACCCTGCCCCCATGCCGGGAGGAGAT | |
| | GACCAAGAACCAGGTCAGCCTGTGGTGCCTGGTCAAAGGCTTCTATCCCAGCGACATCG | |
| | CCGTGGAGTGGGAGAGCAATGGGCAGCCGGAGAACAACTACAAGACCACGCCTCCCGTG | |
| | CTGGACTCCGACGGCTCCTTCTTCCTCTACAGCAAGCTCACCGTGGACAAGAGCAGGTG | |
| | GCAGCAGGGGAACGTCTTCTCATGCTCCGTGATGCATGAGGCTCTGCACAACCACTACA | |
| | CGCAGAAGAGCCTCTCCCTGTCTCCGGGTAAA | |
| EPB04 HC | GAGGTTCAACTCCTTGAATCCGGAGGAGGACTTGTCCAACCAGGCGGCAGCCTTAGGCT | 534 |
| | GTCCTGCGCTGCCTCAGGCTTTACATTCAGTCATTACATGATGGCCTGGGTTAGACAGG | |
| | CACCCGGCAAAGGTCTGGAATGGGTCAGCCGAATAGGACCATCAGGAGGTCCCACTCAC | |
| | TATGCCGATTCTGTAAAAGGGAGGTTTACAATTTCCAGAGACAATTCAAAGAATACCCT | |
| | TTACCTCCAGATGAACTCATTGAGAGCCGAGGACACAGCCGTATATTATTGCGCAGGTT | |
| | ATGATTCCGGTTACGATTACGTTGCAGTCGCAGGCCCAGCCGAATACTTCCAACATTGG | |
| | GGTCAGGGAACCCTCGTGACCGTGTCCAGTGCTAGCACCAAAGGACCTAGTGTTTTTCC | |
| | TCTTGCCCCTGAGGTGCAACTGCTTGAGTCAGGAGGAGGACTGGTTCAACCCGGCGGGA | |
| | GCCTTCGACTCTCATGTGCAGCCTCTGGGTTTACATTTAGTCGTTACCAAATGATGTGG | |
| | GTACGCCAGGCCCCCGGAAAATGTTTGGAGTGGGTGAGCAGCATTTCTCCTTCAGGAGG | |
| | AGTGACACTTTACGCAGACAGTGTTAAGGGTCGGTTCACAATCAGTCGTGATAATTCCA | |
| | AGAACACTCTCTATCTCCAAATGAACTCCCTTCGAGCTGAGGACACTGCTGTTTATTAC | |
| | TGTACTCGGGAACTTCTCGGCACTGTGGTTGTTCCTGTGGCTTGGAAGATGCGTGGATA | |
| | CTTCGACTATTGGGGGCAACTCACTCTTGTTACCGTCTCAAGCGCTAGCACCAAAGGAC | |
| | CTAGTGTTTTTCCTCTTGCCCCTTCCTCAAAGTCTACCTCTGGGGGGACAGCCGCTCTG | |
| | GGCTGCCTGGTCAAGGATTATTTCCCAGAGCCTGTCACTGTCAGTTGGAACTCTGGAGC | |
| | CTTGACTTCTGGTGTTCATACATTTCCTGCTGTCCTTCAAAGCAGCGGCTTGTACTCAT | |
| | TGTCTTCTGTTGTGACAGTACCCTCAAGCAGCCTCGGCACTCAGACATACATCTGCAAT | |
| | GTCAACCACAAACCCTCAAATACAAAGGTAGATAAAAAAGTCGAACCAAAGTCTTGTGA | |
| | CAAAACTCACACGTGCCCACCGTGCCCAGCACCTGAACTCCTGGGGGGACCGTCAGTCT | |
| | TCCTCTTCCCCCCAAAACCCAAGGACACCCTCATGATCTCCCGGACCCCTGAGGTCACA | |
| | TGCGTGGTGGTGGACGTGAGCCACGAAGACCCTGAGGTCAAGTTCAACTGGTACGTGGA | |
| | CGGCGTGGAGGTGCATAATGCCAAGACAAAGCCGCGGGAGGAGCAGTACAACAGCACGT | |
| | ACCGTGTGGTCAGCGTCCTCACCGTCCTGCACCAGGACTGGCTGAATGGCAAGGAGTAC | |
| | AAGTGCAAGGTCTCCAACAAAGCCCTCCCAGCCCCCATCGAGAAAACCATCTCCAAAGC | |
| | CAAAGGGCAGCCCCGAGAACCACAGGTGTACACCCTGCCCCCATGCCGGGAGGAGATGA | |
| | CCAAGAACCAGGTCAGCCTGTGGTGCCTGGTCAAAGGCTTCTATCCCAGCGACATCGCC | |
| | GTGGAGTGGGAGAGCAATGGGCAGCCGGAGAACAACTACAAGACCACGCCTCCCGTGCT | |
| | GGACTCCGACGGCTCCTTCTTCCTCTACAGCAAGCTCACCGTGGACAAGAGCAGGTGGC | |
| | AGCAGGGGAACGTCTTCTCATGCTCCGTGATGCATGAGGCTCTGCACAACCACTACACG | |
| | CAGAAGAGCCTCTCCCTGTCTCCGGGTAAA | |
| EPB04 LC | GACATACAGATGACACAAAGTCCAAGTAGCCTTTCTGCATCCGTTGGAGACCGCGTAAC | 535 |
| | CATAACTTGTCGAGCATCACAAAGCATAAGCACTTGGCTTGCTTGGTATCAGCAGAAGC | |
| | CAGGCAAAGCACCCAAGCTGCTGATTTATAAAGCCTCTAATCTCCATACAGGAGTTCCC | |
| | AGCCGTTTCTCAGGCAGCGGGTCTGGAACCGAATTCTCTCTGACCATCTCTGGCTTGCA | |
| | ACCTGATGACTTTGCAACATATTACTGTCAACAATATAATTCATATAGTCGTACTTTCG | |
| | GGCAAGGCACTAAGGTGGAAATCAAACGTACGGTGGCAGCTCCCAGCGTTTTTATCTTT | |
| | CCCCCAGACATACAGATGACTCAGAGCCCTGGTACACTGAGTGTATCTCCTGGGGAACG | |
| | CGCCACTCTGTCTTGCCGAGCCTCTCAAAGCGTTAGTTCCAACCTGGCTTGGTATCAGC | |
| | AAAAACCCGGTCAAGCACCTCGCTTGCTTATCTACGGGGCCTCCACACGGGCAACCGGC | |
| | ATTCCTGCACGCTTTAGTGGCTCTGGTAGCGGGACTGAATTCACTTTGACTATATCTTC | |
| | CATGCAGAGTGAGGATTTCGCCGTTTATTATTGTCAACAGTACAATAACTGGCCTCCAC | |
| | TCACTTTTGGTTGTGGCACCAAAGTGGAGATAAAGCGTACGGTGGCAGCTCCCAGCGTT | |
| | TTTATCTTTCCCCCATCCGACGAGCAGCTCAAGAGTGGCACTGCCTCTGTAGTTTGTTT | |
| | GCTGAATAACTTCTATCCACGTGAAGCAAAAGTACAGTGGAAGGTCGATAATGCCCTTC | |
| | AGAGCGGTAACAGCCAAGAAAGTGTTACCGAGCAAGATTCCAAAGATTCCACTTACAGT | |
| | CTGTCCAGCACATTGACACTGAGTAAGGCTGATTACGAAAAACACAAGGTGTACGCATG | |
| | CGAGGTGACACACCAAGGTCTTTCATCTCCTGTAACTAAGAGCTTTAACCGGGGAGAAT | |
| | GTGGTGGTGGGGGCAGCGGGGGCGGAGGTAGTGGAGGCGGCGGTAGTGAACCAAAGAGT | |
| | AGTGACAAAACTCACACGTGCCCACCGTGCCCAGCACCTGAACTCCTGGGGGGACCGTC | |
| | AGTCTTCCTCTTCCCCCCAAAACCCAAGGACACCCTCATGATCTCCCGGACCCCTGAGG | |
| | TCACATGCGTGGTGGTGGACGTGAGCCACGAAGACCCTGAGGTCAAGTTCAACTGGTAC | |
| | GTGGACGGCGTGGAGGTGCATAATGCCAAGACAAAGCCGCGGGAGGAGCAGTACAACAG | |
| | CACGTACCGTGTGGTCAGCGTCCTCACCGTCCTGCACCAGGACTGGCTGAATGGCAAGG | |
| | AGTACAAGTGCAAGGTCTCCAACAAAGCCCTCCCAGCCCCCATCGAGAAAACCATCTCC | |
| | AAAGCCAAAGGGCAGCCCCGAGAACCACAGGTGTACACCCTGCCCCCATGCCGGGAGGA | |
| | GATGACCAAGAACCAGGTCAGCCTGTGGTGCCTGGTCAAAGGCTTCTATCCCAGCGACA | |
| | TCGCCGTGGAGTGGGAGAGCAATGGGCAGCCGGAGAACAACTACAAGACCACGCCTCCC | |
| | GTGCTGGACTCCGACGGCTCCTTCTTCCTCTACAGCAAGCTCACCGTGGACAAGAGCAG | |
| | GTGGCAGCAGGGGAACGTCTTCTCATGCTCCGTGATGCATGAGGCTCTGCACAACCACT | |
| | ACACGCAGAAGAGCCTCTCCCTGTCTCCGGGTAAA | |
| EPB05 HC | GAGGTTCAACTCCTTGAATCCGGAGGAGGACTTGTCCAACCAGGCGGCAGCCTTAGGCT | 536 |
| | GTCCTGCGCTGCCTCAGGCTTTACATTCAGTCATTACATGATGGCCTGGGTTAGACAGG | |
| | CACCCGGCAAAGGTCTGGAATGGGTCAGCCGAATAGGACCATCAGGAGGTCCCACTCAC | |
| | TATGCCGATTCTGTAAAAGGGAGGTTTACAATTTCCAGAGACAATTCAAAGAATACCCT | |
| | TTACCTCCAGATGAACTCATTGAGAGCCGAGGACACAGCCGTATATTATTGCGCAGGTT | |
| | ATGATTCCGGTTACGATTACGTTGCAGTCGCAGGCCCAGCCGAATACTTCCAACATTGG | |
| | GGTCAGGGAACCCTCGTGACCGTGTCCAGTGCTAGCACCAAAGGACCTAGTGTTTTTCC | |
| | TCTTGCCCCTGAGGTCCAGCTGGTTGAGTCTGGAGGTGGTGTAGTCAGGCCAGGAGGTT | |
| | CCCTGCGTCTGTCTTGCGCTGCCTCTGGGTTCACTGTGTCTGACTACAGTATGAACTGG | |
| | GTTAGACAGGCTCCAGGGAAATGTTTGGAATGGATAGGGTTTATTCGCAATAAAGCCAA | |
| | TGCCTATACCACCGAATACAGCGCAAGCGTTAAAGGCAGGTTCACCATCAGTAGGGACG | |
| | ACTCTAAGAATACCCTCTACCTGCAGATGAATAGCTTGAAGACAGAGGATACCGCTGTT | |
| | TATTACTGCACTACCTACCCCAGGTATCATGCTATGGACAGTTGGGGTCAAGGAACTAT | |
| | GGTCACCGTCTCCTCTGCTAGCACCAAAGGACCTAGTGTTTTTCCTCTTGCCCCTTCCT | |
| | CAAAGTCTACCTCTGGGGGGACAGCCGCTCTGGGCTGCCTGGTCAAGGATTATTTCCCA | |
| | GAGCCTGTCACTGTCAGTTGGAACTCTGGAGCCTTGACTTCTGGTGTTCATACATTTCC | |
| | TGCTGTCCTTCAAAGCAGCGGCTTGTACTCATTGTCTTCTGTTGTGACAGTACCCTCAA | |
| | GCAGCCTCGGCACTCAGACATACATCTGCAATGTCAACCACAAACCCTCAAATACAAAG | |
| | GTAGATAAAAAAGTCGAACCAAAGTCTTGTGACAAAACTCACACGTGCCCACCGTGCCC | |
| | AGCACCTGAACTCCTGGGGGGACCGTCAGTCTTCCTCTTCCCCCCAAAACCCAAGGACA | |
| | CCCTCATGATCTCCCGGACCCCTGAGGTCACATGCGTGGTGGTGGACGTGAGCCACGAA | |
| | GACCCTGAGGTCAAGTTCAACTGGTACGTGGACGGCGTGGAGGTGCATAATGCCAAGAC | |
| | AAAGCCGCGGGAGGAGCAGTACAACAGCACGTACCGTGTGGTCAGCGTCCTCACCGTCC | |
| | TGCACCAGGACTGGCTGAATGGCAAGGAGTACAAGTGCAAGGTCTCCAACAAAGCCCTC | |
| | CCAGCCCCCATCGAGAAAACCATCTCCAAAGCCAAAGGGCAGCCCCGAGAACCACAGGT | |
| | GTACACCCTGCCCCCATGCCGGGAGGAGATGACCAAGAACCAGGTCAGCCTGTGGTGCC | |
| | TGGTCAAAGGCTTCTATCCCAGCGACATCGCCGTGGAGTGGGAGAGCAATGGGCAGCCG | |
| | GAGAACAACTACAAGACCACGCCTCCCGTGCTGGACTCCGACGGCTCCTTCTTCCTCTA | |
| | CAGCAAGCTCACCGTGGACAAGAGCAGGTGGCAGCAGGGGAACGTCTTCTCATGCTCCG | |
| | TGATGCATGAGGCTCTGCACAACCACTACACGCAGAAGAGCCTCTCCCTGTCTCCGGGT | |
| | AAA | |
| EPB05 LC | GACATACAGATGACACAAAGTCCAAGTAGCCTTTCTGCATCCGTTGGAGACCGCGTAAC | 537 |
| | CATAACTTGTCGAGCATCACAAAGCATAAGCACTTGGCTTGCTTGGTATCAGCAGAAGC | |
| | CAGGCAAAGCACCCAAGCTGCTGATTTATAAAGCCTCTAATCTCCATACAGGAGTTCCC | |
| | AGCCGTTTCTCAGGCAGCGGGTCTGGAACCGAATTCTCTCTGACCATCTCTGGCTTGCA | |
| | ACCTGATGACTTTGCAACATATTACTGTCAACAATATAATTCATATAGTCGTACTTTCG | |
| | GGCAAGGCACTAAGGTGGAAATCAAACGTACGGTGGCAGCTCCCAGCGTTTTTATCTTT | |
| | CCCCCAGCCATACAGCTGACTCAATCACCTTCTTCTTTGAGCGCCTCTGTCGGTGATCG | |
| | CGTTACAATTACATGCCGAGCTTCTCAGTCTATCTCTAATAACCTCCACTGGTATCTCC | |
| | AGAAACCTGGACAGTCACCACAGCTTCTGATATATTACGGCTTTCAGTCTATAAGTGGA | |
| | GTCCCAAGTAGATTTTCCGGTAGTGGATCTGGCACCGATTTTACTCTTACTATCTCTAG | |
| | CCTCCAACCTGAAGATTTCGCAACCTATTACTGCCAGCAGGCCAATTCCTGGCCCTTGA | |
| | CCTTCGGATGTGGGACTAAGCTGGAAATCAAACGTACGGTGGCAGCTCCCAGCGTTTTT | |
| | ATCTTTCCCCCATCCGACGAGCAGCTCAAGAGTGGCACTGCCTCTGTAGTTTGTTTGCT | |
| | GAATAACTTCTATCCACGTGAAGCAAAAGTACAGTGGAAGGTCGATAATGCCCTTCAGA | |
| | GCGGTAACAGCCAAGAAAGTGTTACCGAGCAAGATTCCAAAGATTCCACTTACAGTCTG | |
| | TCCAGCACATTGACACTGAGTAAGGCTGATTACGAAAAACACAAGGTGTACGCATGCGA | |
| | GGTGACACACCAAGGTCTTTCATCTCCTGTAACTAAGAGCTTTAACCGGGGAGAATGTG | |
| | GTGGTGGGGGCAGCGGGGGCGGAGGTAGTGGAGGCGGCGGTAGTGAACCAAAGAGTAGT | |
| | GACAAAACTCACACGTGCCCACCGTGCCCAGCACCTGAACTCCTGGGGGGACCGTCAGT | |
| | CTTCCTCTTCCCCCCAAAACCCAAGGACACCCTCATGATCTCCCGGACCCCTGAGGTCA | |
| | CATGCGTGGTGGTGGACGTGAGCCACGAAGACCCTGAGGTCAAGTTCAACTGGTACGTG | |
| | GACGGCGTGGAGGTGCATAATGCCAAGACAAAGCCGCGGGAGGAGCAGTACAACAGCAC | |
| | GTACCGTGTGGTCAGCGTCCTCACCGTCCTGCACCAGGACTGGCTGAATGGCAAGGAGT | |
| | ACAAGTGCAAGGTCTCCAACAAAGCCCTCCCAGCCCCCATCGAGAAAACCATCTCCAAA | |
| | GCCAAAGGGCAGCCCCGAGAACCACAGGTGTACACCCTGCCCCCATGCCGGGAGGAGAT | |
| | GACCAAGAACCAGGTCAGCCTGTGGTGCCTGGTCAAAGGCTTCTATCCCAGCGACATCG | |
| | CCGTGGAGTGGGAGAGCAATGGGCAGCCGGAGAACAACTACAAGACCACGCCTCCCGTG | |
| | CTGGACTCCGACGGCTCCTTCTTCCTCTACAGCAAGCTCACCGTGGACAAGAGCAGGTG | |
| | GCAGCAGGGGAACGTCTTCTCATGCTCCGTGATGCATGAGGCTCTGCACAACCACTACA | |
| | CGCAGAAGAGCCTCTCCCTGTCTCCGGGTAAA | |
| EPB06 HC | GAGGTTCAACTCCTTGAATCCGGAGGAGGACTTGTCCAACCAGGCGGCAGCCTTAGGCT | 538 |
| | GTCCTGCGCTGCCTCAGGCTTTACATTCAGTCATTACATGATGGCCTGGGTTAGACAGG | |
| | CACCCGGCAAAGGTCTGGAATGGGTCAGCCGAATAGGACCATCAGGAGGTCCCACTCAC | |
| | TATGCCGATTCTGTAAAAGGGAGGTTTACAATTTCCAGAGACAATTCAAAGAATACCCT | |
| | TTACCTCCAGATGAACTCATTGAGAGCCGAGGACACAGCCGTATATTATTGCGCAGGTT | |
| | ATGATTCCGGTTACGATTACGTTGCAGTCGCAGGCCCAGCCGAATACTTCCAACATTGG | |
| | GGTCAGGGAACCCTCGTGACCGTGTCCAGTGCTAGCACCAAAGGACCTAGTGTTTTTCC | |
| | TCTTGCCCCTCAAGTGCAACTCCTTGAAAGTGGAGGTGGCCTTGTCCAGCCAGGCGGTT | |
| | CACTGCGTTTGAGCTGTGCCGCATCCGGCTTTACCTTTTCCAGTTACACAATGAGTTGG | |
| | GTCCGTCAAGCACCCGGGCAATGTTTGGAATGGATGGGAACTATTTCATCTGGTGGGAC | |
| | TTACACTTACTATCCCGATAGCGTCAAGGGACGTTTTACCATAAGCCGGGACAACGCTA | |
| | AAAATTCACTCTATCTTCAGATGAACAGTCTTAGGGCTGAGGATACCGCTGTTTATTAT | |
| | TGCGCCCGAGAAGCCATTTTCACCTACTGGGGGCGCGGTACACTTGTCACCGTTAGCAG | |
| | TGCTAGCACCAAAGGACCTAGTGTTTTTCCTCTTGCCCCTTCCTCAAAGTCTACCTCTG | |
| | GGGGGACAGCCGCTCTGGGCTGCCTGGTCAAGGATTATTTCCCAGAGCCTGTCACTGTC | |
| | AGTTGGAACTCTGGAGCCTTGACTTCTGGTGTTCATACATTTCCTGCTGTCCTTCAAAG | |
| | CAGCGGCTTGTACTCATTGTCTTCTGTTGTGACAGTACCCTCAAGCAGCCTCGGCACTC | |
| | AGACATACATCTGCAATGTCAACCACAAACCCTCAAATACAAAGGTAGATAAAAAAGTC | |
| | GAACCAAAGTCTTGTGACAAAACTCACACGTGCCCACCGTGCCCAGCACCTGAACTCCT | |
| | GGGGGGACCGTCAGTCTTCCTCTTCCCCCCAAAACCCAAGGACACCCTCATGATCTCCC | |
| | GGACCCCTGAGGTCACATGCGTGGTGGTGGACGTGAGCCACGAAGACCCTGAGGTCAAG | |
| | TTCAACTGGTACGTGGACGGCGTGGAGGTGCATAATGCCAAGACAAAGCCGCGGGAGGA | |
| | GCAGTACAACAGCACGTACCGTGTGGTCAGCGTCCTCACCGTCCTGCACCAGGACTGGC | |
| | TGAATGGCAAGGAGTACAAGTGCAAGGTCTCCAACAAAGCCCTCCCAGCCCCCATCGAG | |
| | AAAACCATCTCCAAAGCCAAAGGGCAGCCCCGAGAACCACAGGTGTACACCCTGCCCCC | |
| | ATGCCGGGAGGAGATGACCAAGAACCAGGTCAGCCTGTGGTGCCTGGTCAAAGGCTTCT | |
| | ATCCCAGCGACATCGCCGTGGAGTGGGAGAGCAATGGGCAGCCGGAGAACAACTACAAG | |
| | ACCACGCCTCCCGTGCTGGACTCCGACGGCTCCTTCTTCCTCTACAGCAAGCTCACCGT | |
| | GGACAAGAGCAGGTGGCAGCAGGGGAACGTCTTCTCATGCTCCGTGATGCATGAGGCTC | |
| | TGCACAACCACTACACGCAGAAGAGCCTCTCCCTGTCTCCGGGTAAA | |
| EPB06 LC | GACATACAGATGACACAAAGTCCAAGTAGCCTTTCTGCATCCGTTGGAGACCGCGTAAC | 539 |
| | CATAACTTGTCGAGCATCACAAAGCATAAGCACTTGGCTTGCTTGGTATCAGCAGAAGC | |
| | CAGGCAAAGCACCCAAGCTGCTGATTTATAAAGCCTCTAATCTCCATACAGGAGTTCCC | |
| | AGCCGTTTCTCAGGCAGCGGGTCTGGAACCGAATTCTCTCTGACCATCTCTGGCTTGCA | |
| | ACCTGATGACTTTGCAACATATTACTGTCAACAATATAATTCATATAGTCGTACTTTCG | |
| | GGCAAGGCACTAAGGTGGAAATCAAACGTACGGTGGCAGCTCCCAGCGTTTTTATCTTT | |
| | CCCCCAGACATACAACTCACACAAAGTCCAAGCTCTCTTTCCCTTAGTCCAGGAGAACG | |
| | CGTAACTCTCTCATGTAAAGCCTCCCAGGATATCAATAACTATCTCTCTTGGTACCAAC | |
| | AAAAGCCTGACCAAGCTCCTAAGCTGCTTATCAAACGCGCCAATCGGTTGGTAGACGGA | |
| | GTTCCCGACAGGTTCAGTGGGTCAGGCTCAGGTACAGATTTTACCTTGAAGATATCACG | |
| | CGTGGAAGCCGAAGACGTAGGGGTATATTATTGTCTGAAATATGACGAGTTCCCCTATA | |
| | CTTTTGGGTGTGGAACTCGCCTGGAAATAAAACGTACGGTGGCAGCTCCCAGCGTTTTT | |
| | ATCTTTCCCCCATCCGACGAGCAGCTCAAGAGTGGCACTGCCTCTGTAGTTTGTTTGCT | |
| | GAATAACTTCTATCCACGTGAAGCAAAAGTACAGTGGAAGGTCGATAATGCCCTTCAGA | |
| | GCGGTAACAGCCAAGAAAGTGTTACCGAGCAAGATTCCAAAGATTCCACTTACAGTCTG | |
| | TCCAGCACATTGACACTGAGTAAGGCTGATTACGAAAAACACAAGGTGTACGCATGCGA | |
| | GGTGACACACCAAGGTCTTTCATCTCCTGTAACTAAGAGCTTTAACCGGGGAGAATGTG | |
| | GTGGTGGGGGCAGCGGGGGCGGAGGTAGTGGAGGCGGCGGTAGTGAACCAAAGAGTAGT | |
| | GACAAAACTCACACGTGCCCACCGTGCCCAGCACCTGAACTCCTGGGGGGACCGTCAGT | |
| | CTTCCTCTTCCCCCCAAAACCCAAGGACACCCTCATGATCTCCCGGACCCCTGAGGTCA | |
| | CATGCGTGGTGGTGGACGTGAGCCACGAAGACCCTGAGGTCAAGTTCAACTGGTACGTG | |
| | GACGGCGTGGAGGTGCATAATGCCAAGACAAAGCCGCGGGAGGAGCAGTACAACAGCAC | |
| | GTACCGTGTGGTCAGCGTCCTCACCGTCCTGCACCAGGACTGGCTGAATGGCAAGGAGT | |
| | ACAAGTGCAAGGTCTCCAACAAAGCCCTCCCAGCCCCCATCGAGAAAACCATCTCCAAA | |
| | GCCAAAGGGCAGCCCCGAGAACCACAGGTGTACACCCTGCCCCCATGCCGGGAGGAGAT | |
| | GACCAAGAACCAGGTCAGCCTGTGGTGCCTGGTCAAAGGCTTCTATCCCAGCGACATCG | |
| | CCGTGGAGTGGGAGAGCAATGGGCAGCCGGAGAACAACTACAAGACCACGCCTCCCGTG | |
| | CTGGACTCCGACGGCTCCTTCTTCCTCTACAGCAAGCTCACCGTGGACAAGAGCAGGTG | |
| | GCAGCAGGGGAACGTCTTCTCATGCTCCGTGATGCATGAGGCTCTGCACAACCACTACA | |
| | CGCAGAAGAGCCTCTCCCTGTCTCCGGGTAAA | |
| EPB07 HC | GAGGTCCAGCTGGTTGAGTCTGGAGGTGGTGTAGTCAGGCCAGGAGGTTCCCTGCGTCT | 540 |
| | GTCTTGCGCTGCCTCTGGGTTCACTGTGTCTGACTACAGTATGAACTGGGTTAGACAGG | |
| | CTCCAGGGAAAGGTTTGGAATGGATAGGGTTTATTCGCAATAAAGCCAATGCCTATACC | |
| | ACCGAATACAGCGCAAGCGTTAAAGGCAGGTTCACCATCAGTAGGGACGACTCTAAGAA | |
| | TACCCTCTACCTGCAGATGAATAGCTTGAAGACAGAGGATACCGCTGTTTATTACTGCA | |
| | CTACCTACCCCAGGTATCATGCTATGGACAGTTGGGGTCAAGGAACTATGGTCACCGTC | |
| | TCCTCTGCTAGCACCAAAGGACCTAGTGTTTTTCCTCTTGCCCCTGAGGTGCAACTGCT | |
| | TGAGTCAGGAGGAGGACTGGTTCAACCCGGCGGGAGCCTTCGACTCTCATGTGCAGCCT | |
| | CTGGGTTTACATTTAGTCGTTACCAAATGATGTGGGTACGCCAGGCCCCCGGAAAATGT | |
| | TTGGAGTGGGTGAGCAGCATTTCTCCTTCAGGAGGAGTGACACTTTACGCAGACAGTGT | |
| | TAAGGGTCGGTTCACAATCAGTCGTGATAATTCCAAGAACACTCTCTATCTCCAAATGA | |
| | ACTCCCTTCGAGCTGAGGACACTGCTGTTTATTACTGTACTCGGGAACTTCTCGGCACT | |
| | GTGGTTGTTCCTGTGGCTTGGAAGATGCGTGGATACTTCGACTATTGGGGGCAACTCAC | |
| | TCTTGTTACCGTCTCAAGCGCTAGCACCAAAGGACCTAGTGTTTTTCCTCTTGCCCCTT | |
| | CCTCAAAGTCTACCTCTGGGGGGACAGCCGCTCTGGGCTGCCTGGTCAAGGATTATTTC | |
| | CCAGAGCCTGTCACTGTCAGTTGGAACTCTGGAGCCTTGACTTCTGGTGTTCATACATT | |
| | TCCTGCTGTCCTTCAAAGCAGCGGCTTGTACTCATTGTCTTCTGTTGTGACAGTACCCT | |
| | CAAGCAGCCTCGGCACTCAGACATACATCTGCAATGTCAACCACAAACCCTCAAATACA | |
| | AAGGTAGATAAAAAAGTCGAACCAAAGTCTTGTGACAAAACTCACACGTGCCCACCGTG | |
| | CCCAGCACCTGAACTCCTGGGGGGACCGTCAGTCTTCCTCTTCCCCCCAAAACCCAAGG | |
| | ACACCCTCATGATCTCCCGGACCCCTGAGGTCACATGCGTGGTGGTGGACGTGAGCCAC | |
| | GAAGACCCTGAGGTCAAGTTCAACTGGTACGTGGACGGCGTGGAGGTGCATAATGCCAA | |
| | GACAAAGCCGCGGGAGGAGCAGTACAACAGCACGTACCGTGTGGTCAGCGTCCTCACCG | |
| | TCCTGCACCAGGACTGGCTGAATGGCAAGGAGTACAAGTGCAAGGTCTCCAACAAAGCC | |
| | CTCCCAGCCCCCATCGAGAAAACCATCTCCAAAGCCAAAGGGCAGCCCCGAGAACCACA | |
| | GGTGTACACCCTGCCCCCATGCCGGGAGGAGATGACCAAGAACCAGGTCAGCCTGTGGT | |
| | GCCTGGTCAAAGGCTTCTATCCCAGCGACATCGCCGTGGAGTGGGAGAGCAATGGGCAG | |
| | CCGGAGAACAACTACAAGACCACGCCTCCCGTGCTGGACTCCGACGGCTCCTTCTTCCT | |
| | CTACAGCAAGCTCACCGTGGACAAGAGCAGGTGGCAGCAGGGGAACGTCTTCTCATGCT | |
| | CCGTGATGCATGAGGCTCTGCACAACCACTACACGCAGAAGAGCCTCTCCCTGTCTCCG | |
| | GGTAAA | |
| EPB07 LC | GCCATACAGCTGACTCAATCACCTTCTTCTTTGAGCGCCTCTGTCGGTGATCGCGTTAC | 541 |
| | AATTACATGCCGAGCTTCTCAGTCTATCTCTAATAACCTCCACTGGTATCTCCAGAAAC | |
| | CTGGACAGTCACCACAGCTTCTGATATATTACGGCTTTCAGTCTATAAGTGGAGTCCCA | |
| | AGTAGATTTTCCGGTAGTGGATCTGGCACCGATTTTACTCTTACTATCTCTAGCCTCCA | |
| | ACCTGAAGATTTCGCAACCTATTACTGCCAGCAGGCCAATTCCTGGCCCTTGACCTTCG | |
| | GAGGTGGGACTAAGCTGGAAATCAAACGTACGGTGGCAGCTCCCAGCGTTTTTATCTTT | |
| | CCCCCAGACATACAGATGACTCAGAGCCCTGGTACACTGAGTGTATCTCCTGGGGAACG | |
| | CGCCACTCTGTCTTGCCGAGCCTCTCAAAGCGTTAGTTCCAACCTGGCTTGGTATCAGC | |
| | AAAAACCCGGTCAAGCACCTCGCTTGCTTATCTACGGGGCCTCCACACGGGCAACCGGC | |
| | ATTCCTGCACGCTTTAGTGGCTCTGGTAGCGGGACTGAATTCACTTTGACTATATCTTC | |
| | CATGCAGAGTGAGGATTTCGCCGTTTATTATTGTCAACAGTACAATAACTGGCCTCCAC | |
| | TCACTTTTGGTTGTGGCACCAAAGTGGAGATAAAGCGTACGGTGGCAGCTCCCAGCGTT | |
| | TTTATCTTTCCCCCATCCGACGAGCAGCTCAAGAGTGGCACTGCCTCTGTAGTTTGTTT | |
| | GCTGAATAACTTCTATCCACGTGAAGCAAAAGTACAGTGGAAGGTCGATAATGCCCTTC | |
| | AGAGCGGTAACAGCCAAGAAAGTGTTACCGAGCAAGATTCCAAAGATTCCACTTACAGT | |
| | CTGTCCAGCACATTGACACTGAGTAAGGCTGATTACGAAAAACACAAGGTGTACGCATG | |
| | CGAGGTGACACACCAAGGTCTTTCATCTCCTGTAACTAAGAGCTTTAACCGGGGAGAAT | |
| | GTGGTGGTGGGGGCAGCGGGGGCGGAGGTAGTGGAGGCGGCGGTAGTGAACCAAAGAGT | |
| | AGTGACAAAACTCACACGTGCCCACCGTGCCCAGCACCTGAACTCCTGGGGGGACCGTC | |
| | AGTCTTCCTCTTCCCCCCAAAACCCAAGGACACCCTCATGATCTCCCGGACCCCTGAGG | |
| | TCACATGCGTGGTGGTGGACGTGAGCCACGAAGACCCTGAGGTCAAGTTCAACTGGTAC | |
| | GTGGACGGCGTGGAGGTGCATAATGCCAAGACAAAGCCGCGGGAGGAGCAGTACAACAG | |
| | CACGTACCGTGTGGTCAGCGTCCTCACCGTCCTGCACCAGGACTGGCTGAATGGCAAGG | |
| | AGTACAAGTGCAAGGTCTCCAACAAAGCCCTCCCAGCCCCCATCGAGAAAACCATCTCC | |
| | AAAGCCAAAGGGCAGCCCCGAGAACCACAGGTGTACACCCTGCCCCCATGCCGGGAGGA | |
| | GATGACCAAGAACCAGGTCAGCCTGTGGTGCCTGGTCAAAGGCTTCTATCCCAGCGACA | |
| | TCGCCGTGGAGTGGGAGAGCAATGGGCAGCCGGAGAACAACTACAAGACCACGCCTCCC | |
| | GTGCTGGACTCCGACGGCTCCTTCTTCCTCTACAGCAAGCTCACCGTGGACAAGAGCAG | |
| | GTGGCAGCAGGGGAACGTCTTCTCATGCTCCGTGATGCATGAGGCTCTGCACAACCACT | |
| | ACACGCAGAAGAGCCTCTCCCTGTCTCCGGGTAAA | |
| EPB08 HC | CAAGTGCAACTCCTTGAAAGTGGAGGTGGCCTTGTCCAGCCAGGCGGTTCACTGCGTTT | 542 |
| | GAGCTGTGCCGCATCCGGCTTTACCTTTTCCAGTTACACAATGAGTTGGGTCCGTCAAG | |
| | CACCCGGGCAAGCTTTGGAATGGATGGGAACTATTTCATCTGGTGGGACTTACACTTAC | |
| | TATCCCGATAGCGTCAAGGGACGTTTTACCATAAGCCGGGACAACGCTAAAAATTCACT | |
| | CTATCTTCAGATGAACAGTCTTAGGGCTGAGGATACCGCTGTTTATTATTGCGCCCGAG | |
| | AAGCCATTTTCACCTACTGGGGGCGCGGTACACTTGTCACCGTTAGCAGTGCTAGCACC | |
| | AAAGGACCTAGTGTTTTTCCTCTTGCCCCTGAGGTGCAACTGCTTGAGTCAGGAGGAGG | |
| | ACTGGTTCAACCCGGCGGGAGCCTTCGACTCTCATGTGCAGCCTCTGGGTTTACATTTA | |
| | GTCGTTACCAAATGATGTGGGTACGCCAGGCCCCCGGAAAATGTTTGGAGTGGGTGAGC | |
| | AGCATTTCTCCTTCAGGAGGAGTGACACTTTACGCAGACAGTGTTAAGGGTCGGTTCAC | |
| | AATCAGTCGTGATAATTCCAAGAACACTCTCTATCTCCAAATGAACTCCCTTCGAGCTG | |
| | AGGACACTGCTGTTTATTACTGTACTCGGGAACTTCTCGGCACTGTGGTTGTTCCTGTG | |
| | GCTTGGAAGATGCGTGGATACTTCGACTATTGGGGGCAACTCACTCTTGTTACCGTCTC | |
| | AAGCGCTAGCACCAAAGGACCTAGTGTTTTTCCTCTTGCCCCTTCCTCAAAGTCTACCT | |
| | CTGGGGGGACAGCCGCTCTGGGCTGCCTGGTCAAGGATTATTTCCCAGAGCCTGTCACT | |
| | GTCAGTTGGAACTCTGGAGCCTTGACTTCTGGTGTTCATACATTTCCTGCTGTCCTTCA | |
| | AAGCAGCGGCTTGTACTCATTGTCTTCTGTTGTGACAGTACCCTCAAGCAGCCTCGGCA | |
| | CTCAGACATACATCTGCAATGTCAACCACAAACCCTCAAATACAAAGGTAGATAAAAAA | |
| | GTCGAACCAAAGTCTTGTGACAAAACTCACACGTGCCCACCGTGCCCAGCACCTGAACT | |
| | CCTGGGGGGACCGTCAGTCTTCCTCTTCCCCCCAAAACCCAAGGACACCCTCATGATCT | |
| | CCCGGACCCCTGAGGTCACATGCGTGGTGGTGGACGTGAGCCACGAAGACCCTGAGGTC | |
| | AAGTTCAACTGGTACGTGGACGGCGTGGAGGTGCATAATGCCAAGACAAAGCCGCGGGA | |
| | GGAGCAGTACAACAGCACGTACCGTGTGGTCAGCGTCCTCACCGTCCTGCACCAGGACT | |
| | GGCTGAATGGCAAGGAGTACAAGTGCAAGGTCTCCAACAAAGCCCTCCCAGCCCCCATC | |
| | GAGAAAACCATCTCCAAAGCCAAAGGGCAGCCCCGAGAACCACAGGTGTACACCCTGCC | |
| | CCCATGCCGGGAGGAGATGACCAAGAACCAGGTCAGCCTGTGGTGCCTGGTCAAAGGCT | |
| | TCTATCCCAGCGACATCGCCGTGGAGTGGGAGAGCAATGGGCAGCCGGAGAACAACTAC | |
| | AAGACCACGCCTCCCGTGCTGGACTCCGACGGCTCCTTCTTCCTCTACAGCAAGCTCAC | |
| | CGTGGACAAGAGCAGGTGGCAGCAGGGGAACGTCTTCTCATGCTCCGTGATGCATGAGG | |
| | CTCTGCACAACCACTACACGCAGAAGAGCCTCTCCCTGTCTCCGGGTAAA | |
| EPB08 LC | GACATACAACTCACACAAAGTCCAAGCTCTCTTTCCCTTAGTCCAGGAGAACGCGTAAC | 543 |
| | TCTCTCATGTAAAGCCTCCCAGGATATCAATAACTATCTCTCTTGGTACCAACAAAAGC | |
| | CTGACCAAGCTCCTAAGCTGCTTATCAAACGCGCCAATCGGTTGGTAGACGGAGTTCCC | |
| | GACAGGTTCAGTGGGTCAGGCTCAGGTACAGATTTTACCTTGAAGATATCACGCGTGGA | |
| | AGCCGAAGACGTAGGGGTATATTATTGTCTGAAATATGACGAGTTCCCCTATACTTTTG | |
| | GGCAAGGAACTCGCCTGGAAATAAAACGTACGGTGGCAGCTCCCAGCGTTTTTATCTTT | |
| | CCCCCAGACATACAGATGACTCAGAGCCCTGGTACACTGAGTGTATCTCCTGGGGAACG | |
| | CGCCACTCTGTCTTGCCGAGCCTCTCAAAGCGTTAGTTCCAACCTGGCTTGGTATCAGC | |
| | AAAAACCCGGTCAAGCACCTCGCTTGCTTATCTACGGGGCCTCCACACGGGCAACCGGC | |
| | ATTCCTGCACGCTTTAGTGGCTCTGGTAGCGGGACTGAATTCACTTTGACTATATCTTC | |
| | CATGCAGAGTGAGGATTTCGCCGTTTATTATTGTCAACAGTACAATAACTGGCCTCCAC | |
| | TCACTTTTGGTTGTGGCACCAAAGTGGAGATAAAGCGTACGGTGGCAGCTCCCAGCGTT | |
| | TTTATCTTTCCCCCATCCGACGAGCAGCTCAAGAGTGGCACTGCCTCTGTAGTTTGTTT | |
| | GCTGAATAACTTCTATCCACGTGAAGCAAAAGTACAGTGGAAGGTCGATAATGCCCTTC | |
| | AGAGCGGTAACAGCCAAGAAAGTGTTACCGAGCAAGATTCCAAAGATTCCACTTACAGT | |
| | CTGTCCAGCACATTGACACTGAGTAAGGCTGATTACGAAAAACACAAGGTGTACGCATG | |
| | CGAGGTGACACACCAAGGTCTTTCATCTCCTGTAACTAAGAGCTTTAACCGGGGAGAAT | |
| | GTGGTGGTGGGGGCAGCGGGGGCGGAGGTAGTGGAGGCGGCGGTAGTGAACCAAAGAGT | |
| | AGTGACAAAACTCACACGTGCCCACCGTGCCCAGCACCTGAACTCCTGGGGGGACCGTC | |
| | AGTCTTCCTCTTCCCCCCAAAACCCAAGGACACCCTCATGATCTCCCGGACCCCTGAGG | |
| | TCACATGCGTGGTGGTGGACGTGAGCCACGAAGACCCTGAGGTCAAGTTCAACTGGTAC | |
| | GTGGACGGCGTGGAGGTGCATAATGCCAAGACAAAGCCGCGGGAGGAGCAGTACAACAG | |
| | CACGTACCGTGTGGTCAGCGTCCTCACCGTCCTGCACCAGGACTGGCTGAATGGCAAGG | |
| | AGTACAAGTGCAAGGTCTCCAACAAAGCCCTCCCAGCCCCCATCGAGAAAACCATCTCC | |
| | AAAGCCAAAGGGCAGCCCCGAGAACCACAGGTGTACACCCTGCCCCCATGCCGGGAGGA | |
| | GATGACCAAGAACCAGGTCAGCCTGTGGTGCCTGGTCAAAGGCTTCTATCCCAGCGACA | |
| | TCGCCGTGGAGTGGGAGAGCAATGGGCAGCCGGAGAACAACTACAAGACCACGCCTCCC | |
| | GTGCTGGACTCCGACGGCTCCTTCTTCCTCTACAGCAAGCTCACCGTGGACAAGAGCAG | |
| | GTGGCAGCAGGGGAACGTCTTCTCATGCTCCGTGATGCATGAGGCTCTGCACAACCACT | |
| | ACACGCAGAAGAGCCTCTCCCTGTCTCCGGGTAAA | |
| EPB09 HC | GAGGTGCAACTGCTTGAGTCAGGAGGAGGACTGGTTCAACCCGGCGGGAGCCTTCGACT | 544 |
| | CTCATGTGCAGCCTCTGGGTTTACATTTAGTCGTTACCAAATGATGTGGGTACGCCAGG | |
| | CCCCCGGAAAAGGTTTGGAGTGGGTGAGCAGCATTTCTCCTTCAGGAGGAGTGACACTT | |
| | TACGCAGACAGTGTTAAGGGTCGGTTCACAATCAGTCGTGATAATTCCAAGAACACTCT | |
| | CTATCTCCAAATGAACTCCCTTCGAGCTGAGGACACTGCTGTTTATTACTGTACTCGGG | |
| | AACTTCTCGGCACTGTGGTTGTTCCTGTGGCTTGGAAGATGCGTGGATACTTCGACTAT | |
| | TGGGGGCAACTCACTCTTGTTACCGTCTCAAGCGCTAGCACCAAAGGACCTAGTGTTTT | |
| | TCCTCTTGCCCCTGAGGTCCAGCTGGTTGAGTCTGGAGGTGGTGTAGTCAGGCCAGGAG | |
| | GTTCCCTGCGTCTGTCTTGCGCTGCCTCTGGGTTCACTGTGTCTGACTACAGTATGAAC | |
| | TGGGTTAGACAGGCTCCAGGGAAATGTTTGGAATGGATAGGGTTTATTCGCAATAAAGC | |
| | CAATGCCTATACCACCGAATACAGCGCAAGCGTTAAAGGCAGGTTCACCATCAGTAGGG | |
| | ACGACTCTAAGAATACCCTCTACCTGCAGATGAATAGCTTGAAGACAGAGGATACCGCT | |
| | GTTTATTACTGCACTACCTACCCCAGGTATCATGCTATGGACAGTTGGGGTCAAGGAAC | |
| | TATGGTCACCGTCTCCTCTGCTAGCACCAAAGGACCTAGTGTTTTTCCTCTTGCCCCTT | |
| | CCTCAAAGTCTACCTCTGGGGGGACAGCCGCTCTGGGCTGCCTGGTCAAGGATTATTTC | |
| | CCAGAGCCTGTCACTGTCAGTTGGAACTCTGGAGCCTTGACTTCTGGTGTTCATACATT | |
| | TCCTGCTGTCCTTCAAAGCAGCGGCTTGTACTCATTGTCTTCTGTTGTGACAGTACCCT | |
| | CAAGCAGCCTCGGCACTCAGACATACATCTGCAATGTCAACCACAAACCCTCAAATACA | |
| | AAGGTAGATAAAAAAGTCGAACCAAAGTCTTGTGACAAAACTCACACGTGCCCACCGTG | |
| | CCCAGCACCTGAACTCCTGGGGGGACCGTCAGTCTTCCTCTTCCCCCCAAAACCCAAGG | |
| | ACACCCTCATGATCTCCCGGACCCCTGAGGTCACATGCGTGGTGGTGGACGTGAGCCAC | |
| | GAAGACCCTGAGGTCAAGTTCAACTGGTACGTGGACGGCGTGGAGGTGCATAATGCCAA | |
| | GACAAAGCCGCGGGAGGAGCAGTACAACAGCACGTACCGTGTGGTCAGCGTCCTCACCG | |
| | TCCTGCACCAGGACTGGCTGAATGGCAAGGAGTACAAGTGCAAGGTCTCCAACAAAGCC | |
| | CTCCCAGCCCCCATCGAGAAAACCATCTCCAAAGCCAAAGGGCAGCCCCGAGAACCACA | |
| | GGTGTACACCCTGCCCCCATGCCGGGAGGAGATGACCAAGAACCAGGTCAGCCTGTGGT | |
| | GCCTGGTCAAAGGCTTCTATCCCAGCGACATCGCCGTGGAGTGGGAGAGCAATGGGCAG | |
| | CCGGAGAACAACTACAAGACCACGCCTCCCGTGCTGGACTCCGACGGCTCCTTCTTCCT | |
| | CTACAGCAAGCTCACCGTGGACAAGAGCAGGTGGCAGCAGGGGAACGTCTTCTCATGCT | |
| | CCGTGATGCATGAGGCTCTGCACAACCACTACACGCAGAAGAGCCTCTCCCTGTCTCCG | |
| | GGTAAA | |
| EPB09 LC | GACATACAGATGACTCAGAGCCCTGGTACACTGAGTGTATCTCCTGGGGAACGCGCCAC | 545 |
| | TCTGTCTTGCCGAGCCTCTCAAAGCGTTAGTTCCAACCTGGCTTGGTATCAGCAAAAAC | |
| | CCGGTCAAGCACCTCGCTTGCTTATCTACGGGGCCTCCACACGGGCAACCGGCATTCCT | |
| | GCACGCTTTAGTGGCTCTGGTAGCGGGACTGAATTCACTTTGACTATATCTTCCATGCA | |
| | GAGTGAGGATTTCGCCGTTTATTATTGTCAACAGTACAATAACTGGCCTCCACTCACTT | |
| | TTGGTGGTGGCACCAAAGTGGAGATAAAGCGTACGGTGGCAGCTCCCAGCGTTTTTATC | |
| | TTTCCCCCAGCCATACAGCTGACTCAATCACCTTCTTCTTTGAGCGCCTCTGTCGGTGA | |
| | TCGCGTTACAATTACATGCCGAGCTTCTCAGTCTATCTCTAATAACCTCCACTGGTATC | |
| | TCCAGAAACCTGGACAGTCACCACAGCTTCTGATATATTACGGCTTTCAGTCTATAAGT | |
| | GGAGTCCCAAGTAGATTTTCCGGTAGTGGATCTGGCACCGATTTTACTCTTACTATCTC | |
| | TAGCCTCCAACCTGAAGATTTCGCAACCTATTACTGCCAGCAGGCCAATTCCTGGCCCT | |
| | TGACCTTCGGATGTGGGACTAAGCTGGAAATCAAACGTACGGTGGCAGCTCCCAGCGTT | |
| | TTTATCTTTCCCCCATCCGACGAGCAGCTCAAGAGTGGCACTGCCTCTGTAGTTTGTTT | |
| | GCTGAATAACTTCTATCCACGTGAAGCAAAAGTACAGTGGAAGGTCGATAATGCCCTTC | |
| | AGAGCGGTAACAGCCAAGAAAGTGTTACCGAGCAAGATTCCAAAGATTCCACTTACAGT | |
| | CTGTCCAGCACATTGACACTGAGTAAGGCTGATTACGAAAAACACAAGGTGTACGCATG | |
| | CGAGGTGACACACCAAGGTCTTTCATCTCCTGTAACTAAGAGCTTTAACCGGGGAGAAT | |
| | GTGGTGGTGGGGGCAGCGGGGGCGGAGGTAGTGGAGGCGGCGGTAGTGAACCAAAGAGT | |
| | AGTGACAAAACTCACACGTGCCCACCGTGCCCAGCACCTGAACTCCTGGGGGGACCGTC | |
| | AGTCTTCCTCTTCCCCCCAAAACCCAAGGACACCCTCATGATCTCCCGGACCCCTGAGG | |
| | TCACATGCGTGGTGGTGGACGTGAGCCACGAAGACCCTGAGGTCAAGTTCAACTGGTAC | |
| | GTGGACGGCGTGGAGGTGCATAATGCCAAGACAAAGCCGCGGGAGGAGCAGTACAACAG | |
| | CACGTACCGTGTGGTCAGCGTCCTCACCGTCCTGCACCAGGACTGGCTGAATGGCAAGG | |
| | AGTACAAGTGCAAGGTCTCCAACAAAGCCCTCCCAGCCCCCATCGAGAAAACCATCTCC | |
| | AAAGCCAAAGGGCAGCCCCGAGAACCACAGGTGTACACCCTGCCCCCATGCCGGGAGGA | |
| | GATGACCAAGAACCAGGTCAGCCTGTGGTGCCTGGTCAAAGGCTTCTATCCCAGCGACA | |
| | TCGCCGTGGAGTGGGAGAGCAATGGGCAGCCGGAGAACAACTACAAGACCACGCCTCCC | |
| | GTGCTGGACTCCGACGGCTCCTTCTTCCTCTACAGCAAGCTCACCGTGGACAAGAGCAG | |
| | GTGGCAGCAGGGGAACGTCTTCTCATGCTCCGTGATGCATGAGGCTCTGCACAACCACT | |
| | ACACGCAGAAGAGCDCTCTCCCTGTCTCCGGGTAAA | |
| EPB10 HC | CAAGTGCAACTCCTTGAAAGTGGAGGTGGCCTTGTCCAGCCAGGCGGTTCACTGCGTTT | 546 |
| | GAGCTGTGCCGCATCCGGCTTTACCTTTTCCAGTTACACAATGAGTTGGGTCCGTCAAG | |
| | CACCCGGGCAAGCTTTGGAATGGATGGGAACTATTTCATCTGGTGGGACTTACACTTAC | |
| | TATCCCGATAGCGTCAAGGGACGTTTTACCATAAGCCGGGACAACGCTAAAAATTCACT | |
| | CTATCTTCAGATGAACAGTCTTAGGGCTGAGGATACCGCTGTTTATTATTGCGCCCGAG | |
| | AAGCCATTTTCACCTACTGGGGGCGCGGTACACTTGTCACCGTTAGCAGTGCTAGCACC | |
| | AAAGGACCTAGTGTTTTTCCTCTTGCCCCTGAGGTCCAGCTGGTTGAGTCTGGAGGTGG | |
| | TGTAGTCAGGCCAGGAGGTTCCCTGCGTCTGTCTTGCGCTGCCTCTGGGTTCACTGTGT | |
| | CTGACTACAGTATGAACTGGGTTAGACAGGCTCCAGGGAAATGTTTGGAATGGATAGGG | |
| | TTTATTCGCAATAAAGCCAATGCCTATACCACCGAATACAGCGCAAGCGTTAAAGGCAG | |
| | GTTCACCATCAGTAGGGACGACTCTAAGAATACCCTCTACCTGCAGATGAATAGCTTGA | |
| | AGACAGAGGATACCGCTGTTTATTACTGCACTACCTACCCCAGGTATCATGCTATGGAC | |
| | AGTTGGGGTCAAGGAACTATGGTCACCGTCTCCTCTGCTAGCACCAAAGGACCTAGTGT | |
| | TTTTCCTCTTGCCCCTTCCTCAAAGTCTACCTCTGGGGGGACAGCCGCTCTGGGCTGCC | |
| | TGGTCAAGGATTATTTCCCAGAGCCTGTCACTGTCAGTTGGAACTCTGGAGCCTTGACT | |
| | TCTGGTGTTCATACATTTCCTGCTGTCCTTCAAAGCAGCGGCTTGTACTCATTGTCTTC | |
| | TGTTGTGACAGTACCCTCAAGCAGCCTCGGCACTCAGACATACATCTGCAATGTCAACC | |
| | ACAAACCCTCAAATACAAAGGTAGATAAAAAAGTCGAACCAAAGTCTTGTGACAAAACT | |
| | CACACGTGCCCACCGTGCCCAGCACCTGAACTCCTGGGGGGACCGTCAGTCTTCCTCTT | |
| | CCCCCCAAAACCCAAGGACACCCTCATGATCTCCCGGACCCCTGAGGTCACATGCGTGG | |
| | TGGTGGACGTGAGCCACGAAGACCCTGAGGTCAAGTTCAACTGGTACGTGGACGGCGTG | |
| | GAGGTGCATAATGCCAAGACAAAGCCGCGGGAGGAGCAGTACAACAGCACGTACCGTGT | |
| | GGTCAGCGTCCTCACCGTCCTGCACCAGGACTGGCTGAATGGCAAGGAGTACAAGTGCA | |
| | AGGTCTCCAACAAAGCCCTCCCAGCCCCCATCGAGAAAACCATCTCCAAAGCCAAAGGG | |
| | CAGCCCCGAGAACCACAGGTGTACACCCTGCCCCCATGCCGGGAGGAGATGACCAAGAA | |
| | CCAGGTCAGCCTGTGGTGCCTGGTCAAAGGCTTCTATCCCAGCGACATCGCCGTGGAGT | |
| | GGGAGAGCAATGGGCAGCCGGAGAACAACTACAAGACCACGCCTCCCGTGCTGGACTCC | |
| | GACGGCTCCTTCTTCCTCTACAGCAAGCTCACCGTGGACAAGAGCAGGTGGCAGCAGGG | |
| | GAACGTCTTCTCATGCTCCGTGATGCATGAGGCTCTGCACAACCACTACACGCAGAAGA | |
| | GCCTCTCCCTGTCTCCGGGTAAA | |
| EPB10 LC | GACATACAACTCACACAAAGTCCAAGCTCTCTTTCCCTTAGTCCAGGAGAACGCGTAAC | 547 |
| | TCTCTCATGTAAAGCCTCCCAGGATATCAATAACTATCTCTCTTGGTACCAACAAAAGC | |
| | CTGACCAAGCTCCTAAGCTGCTTATCAAACGCGCCAATCGGTTGGTAGACGGAGTTCCC | |
| | GACAGGTTCAGTGGGTCAGGCTCAGGTACAGATTTTACCTTGAAGATATCACGCGTGGA | |
| | AGCCGAAGACGTAGGGGTATATTATTGTCTGAAATATGACGAGTTCCCCTATACTTTTG | |
| | GGCAAGGAACTCGCCTGGAAATAAAACGTACGGTGGCAGCTCCCAGCGTTTTTATCTTT | |
| | CCCCCAGCCATACAGCTGACTCAATCACCTTCTTCTTTGAGCGCCTCTGTCGGTGATCG | |
| | CGTTACAATTACATGCCGAGCTTCTCAGTCTATCTCTAATAACCTCCACTGGTATCTCC | |
| | AGAAACCTGGACAGTCACCACAGCTTCTGATATATTACGGCTTTCAGTCTATAAGTGGA | |
| | GTCCCAAGTAGATTTTCCGGTAGTGGATCTGGCACCGATTTTACTCTTACTATCTCTAG | |
| | CCTCCAACCTGAAGATTTCGCAACCTATTACTGCCAGCAGGCCAATTCCTGGCCCTTGA | |
| | CCTTCGGATGTGGGACTAAGCTGGAAATCAAACGTACGGTGGCAGCTCCCAGCGTTTTT | |
| | ATCTTTCCCCCATCCGACGAGCAGCTCAAGAGTGGCACTGCCTCTGTAGTTTGTTTGCT | |
| | GAATAACTTCTATCCACGTGAAGCAAAAGTACAGTGGAAGGTCGATAATGCCCTTCAGA | |
| | GCGGTAACAGCCAAGAAAGTGTTACCGAGCAAGATTCCAAAGATTCCACTTACAGTCTG | |
| | TCCAGCACATTGACACTGAGTAAGGCTGATTACGAAAAACACAAGGTGTACGCATGCGA | |
| | GGTGACACACCAAGGTCTTTCATCTCCTGTAACTAAGAGCTTTAACCGGGGAGAATGTG | |
| | GTGGTGGGGGCAGCGGGGGCGGAGGTAGTGGAGGCGGCGGTAGTGAACCAAAGAGTAGT | |
| | GACAAAACTCACACGTGCCCACCGTGCCCAGCACCTGAACTCCTGGGGGGACCGTCAGT | |
| | CTTCCTCTTCCCCCCAAAACCCAAGGACACCCTCATGATCTCCCGGACCCCTGAGGTCA | |
| | CATGCGTGGTGGTGGACGTGAGCCACGAAGACCCTGAGGTCAAGTTCAACTGGTACGTG | |
| | GACGGCGTGGAGGTGCATAATGCCAAGACAAAGCCGCGGGAGGAGCAGTACAACAGCAC | |
| | GTACCGTGTGGTCAGCGTCCTCACCGTCCTGCACCAGGACTGGCTGAATGGCAAGGAGT | |
| | ACAAGTGCAAGGTCTCCAACAAAGCCCTCCCAGCCCCCATCGAGAAAACCATCTCCAAA | |
| | GCCAAAGGGCAGCCCCGAGAACCACAGGTGTACACCCTGCCCCCATGCCGGGAGGAGAT | |
| | GACCAAGAACCAGGTCAGCCTGTGGTGCCTGGTCAAAGGCTTCTATCCCAGCGACATCG | |
| | CCGTGGAGTGGGAGAGCAATGGGCAGCCGGAGAACAACTACAAGACCACGCCTCCCGTG | |
| | CTGGACTCCGACGGCTCCTTCTTCCTCTACAGCAAGCTCACCGTGGACAAGAGCAGGTG | |
| | GCAGCAGGGGAACGTCTTCTCATGCTCCGTGATGCATGAGGCTCTGCACAACCACTACA | |
| | CGCAGAAGAGCCTCTCCCTGTCTCCGGGTAAA | |
| EPB11 HC | GAGGTGCAACTGCTTGAGTCAGGAGGAGGACTGGTTCAACCCGGCGGGAGCCTTCGACT | 548 |
| | CTCATGTGCAGCCTCTGGGTTTACATTTAGTCGTTACCAAATGATGTGGGTACGCCAGG | |
| | CCCCCGGAAAAGGTTTGGAGTGGGTGAGCAGCATTTCTCCTTCAGGAGGAGTGACACTT | |
| | TACGCAGACAGTGTTAAGGGTCGGTTCACAATCAGTCGTGATAATTCCAAGAACACTCT | |
| | CTATCTCCAAATGAACTCCCTTCGAGCTGAGGACACTGCTGTTTATTACTGTACTCGGG | |
| | AACTTCTCGGCACTGTGGTTGTTCCTGTGGCTTGGAAGATGCGTGGATACTTCGACTAT | |
| | TGGGGGCAACTCACTCTTGTTACCGTCTCAAGCGCTAGCACCAAAGGACCTAGTGTTTT | |
| | TCCTCTTGCCCCTCAAGTGCAACTCCTTGAAAGTGGAGGTGGCCTTGTCCAGCCAGGCG | |
| | GTTCACTGCGTTTGAGCTGTGCCGCATCCGGCTTTACCTTTTCCAGTTACACAATGAGT | |
| | TGGGTCCGTCAAGCACCCGGGCAATGTTTGGAATGGATGGGAACTATTTCATCTGGTGG | |
| | GACTTACACTTACTATCCCGATAGCGTCAAGGGACGTTTTACCATAAGCCGGGACAACG | |
| | CTAAAAATTCACTCTATCTTCAGATGAACAGTCTTAGGGCTGAGGATACCGCTGTTTAT | |
| | TATTGCGCCCGAGAAGCCATTTTCACCTACTGGGGGCGCGGTACACTTGTCACCGTTAG | |
| | CAGTGCTAGCACCAAAGGACCTAGTGTTTTTCCTCTTGCCCCTTCCTCAAAGTCTACCT | |
| | CTGGGGGGACAGCCGCTCTGGGCTGCCTGGTCAAGGATTATTTCCCAGAGCCTGTCACT | |
| | GTCAGTTGGAACTCTGGAGCCTTGACTTCTGGTGTTCATACATTTCCTGCTGTCCTTCA | |
| | AAGCAGCGGCTTGTACTCATTGTCTTCTGTTGTGACAGTACCCTCAAGCAGCCTCGGCA | |
| | CTCAGACATACATCTGCAATGTCAACCACAAACCCTCAAATACAAAGGTAGATAAAAAA | |
| | GTCGAACCAAAGTCTTGTGACAAAACTCACACGTGCCCACCGTGCCCAGCACCTGAACT | |
| | CCTGGGGGGACCGTCAGTCTTCCTCTTCCCCCCAAAACCCAAGGACACCCTCATGATCT | |
| | CCCGGACCCCTGAGGTCACATGCGTGGTGGTGGACGTGAGCCACGAAGACCCTGAGGTC | |
| | AAGTTCAACTGGTACGTGGACGGCGTGGAGGTGCATAATGCCAAGACAAAGCCGCGGGA | |
| | GGAGCAGTACAACAGCACGTACCGTGTGGTCAGCGTCCTCACCGTCCTGCACCAGGACT | |
| | GGCTGAATGGCAAGGAGTACAAGTGCAAGGTCTCCAACAAAGCCCTCCCAGCCCCCATC | |
| | GAGAAAACCATCTCCAAAGCCAAAGGGCAGCCCCGAGAACCACAGGTGTACACCCTGCC | |
| | CCCATGCCGGGAGGAGATGACCAAGAACCAGGTCAGCCTGTGGTGCCTGGTCAAAGGCT | |
| | TCTATCCCAGCGACATCGCCGTGGAGTGGGAGAGCAATGGGCAGCCGGAGAACAACTAC | |
| | AAGACCACGCCTCCCGTGCTGGACTCCGACGGCTCCTTCTTCCTCTACAGCAAGCTCAC | |
| | CGTGGACAAGAGCAGGTGGCAGCAGGGGAACGTCTTCTCATGCTCCGTGATGCATGAGG | |
| | CTCTGCACAACCACTACACGCAGAAGAGCCTCTCCCTGTCTCCGGGTAAA | |
| EPB11 LC | GACATACAGATGACTCAGAGCCCTGGTACACTGAGTGTATCTCCTGGGGAACGCGCCAC | 549 |
| | TCTGTCTTGCCGAGCCTCTCAAAGCGTTAGTTCCAACCTGGCTTGGTATCAGCAAAAAC | |
| | CCGGTCAAGCACCTCGCTTGCTTATCTACGGGGCCTCCACACGGGCAACCGGCATTCCT | |
| | GCACGCTTTAGTGGCTCTGGTAGCGGGACTGAATTCACTTTGACTATATCTTCCATGCA | |
| | GAGTGAGGATTTCGCCGTTTATTATTGTCAACAGTACAATAACTGGCCTCCACTCACTT | |
| | TTGGTGGTGGCACCAAAGTGGAGATAAAGCGTACGGTGGCAGCTCCCAGCGTTTTTATC | |
| | TTTCCCCCAGACATACAACTCACACAAAGTCCAAGCTCTCTTTCCCTTAGTCCAGGAGA | |
| | ACGCGTAACTCTCTCATGTAAAGCCTCCCAGGATATCAATAACTATCTCTCTTGGTACC | |
| | AACAAAAGCCTGACCAAGCTCCTAAGCTGCTTATCAAACGCGCCAATCGGTTGGTAGAC | |
| | GGAGTTCCCGACAGGTTCAGTGGGTCAGGCTCAGGTACAGATTTTACCTTGAAGATATC | |
| | ACGCGTGGAAGCCGAAGACGTAGGGGTATATTATTGTCTGAAATATGACGAGTTCCCCT | |
| | ATACTTTTGGGTGTGGAACTCGCCTGGAAATAAAACGTACGGTGGCAGCTCCCAGCGTT | |
| | TTTATCTTTCCCCCATCCGACGAGCAGCTCAAGAGTGGCACTGCCTCTGTAGTTTGTTT | |
| | GCTGAATAACTTCTATCCACGTGAAGCAAAAGTACAGTGGAAGGTCGATAATGCCCTTC | |
| | AGAGCGGTAACAGCCAAGAAAGTGTTACCGAGCAAGATTCCAAAGATTCCACTTACAGT | |
| | CTGTCCAGCACATTGACACTGAGTAAGGCTGATTACGAAAAACACAAGGTGTACGCATG | |
| | CGAGGTGACACACCAAGGTCTTTCATCTCCTGTAACTAAGAGCTTTAACCGGGGAGAAT | |
| | GTGGTGGTGGGGGCAGCGGGGGCGGAGGTAGTGGAGGCGGCGGTAGTGAACCAAAGAGT | |
| | AGTGACAAAACTCACACGTGCCCACCGTGCCCAGCACCTGAACTCCTGGGGGGACCGTC | |
| | AGTCTTCCTCTTCCCCCCAAAACCCAAGGACACCCTCATGATCTCCCGGACCCCTGAGG | |
| | TCACATGCGTGGTGGTGGACGTGAGCCACGAAGACCCTGAGGTCAAGTTCAACTGGTAC | |
| | GTGGACGGCGTGGAGGTGCATAATGCCAAGACAAAGCCGCGGGAGGAGCAGTACAACAG | |
| | CACGTACCGTGTGGTCAGCGTCCTCACCGTCCTGCACCAGGACTGGCTGAATGGCAAGG | |
| | AGTACAAGTGCAAGGTCTCCAACAAAGCCCTCCCAGCCCCCATCGAGAAAACCATCTCC | |
| | AAAGCCAAAGGGCAGCCCCGAGAACCACAGGTGTACACCCTGCCCCCATGCCGGGAGGA | |
| | GATGACCAAGAACCAGGTCAGCCTGTGGTGCCTGGTCAAAGGCTTCTATCCCAGCGACA | |
| | TCGCCGTGGAGTGGGAGAGCAATGGGCAGCCGGAGAACAACTACAAGACCACGCCTCCC | |
| | GTGCTGGACTCCGACGGCTCCTTCTTCCTCTACAGCAAGCTCACCGTGGACAAGAGCAG | |
| | GTGGCAGCAGGGGAACGTCTTCTCATGCTCCGTGATGCATGAGGCTCTGCACAACCACT | |
| | ACACGCAGAAGAGCCTCTCCCTGTCTCCGGGTAAA | |
| EPB12 HC | GAGGTCCAGCTGGTTGAGTCTGGAGGTGGTGTAGTCAGGCCAGGAGGTTCCCTGCGTCT | 550 |
| | GTCTTGCGCTGCCTCTGGGTTCACTGTGTCTGACTACAGTATGAACTGGGTTAGACAGG | |
| | CTCCAGGGAAAGGTTTGGAATGGATAGGGTTTATTCGCAATAAAGCCAATGCCTATACC | |
| | ACCGAATACAGCGCAAGCGTTAAAGGCAGGTTCACCATCAGTAGGGACGACTCTAAGAA | |
| | TACCCTCTACCTGCAGATGAATAGCTTGAAGACAGAGGATACCGCTGTTTATTACTGCA | |
| | CTACCTACCCCAGGTATCATGCTATGGACAGTTGGGGTCAAGGAACTATGGTCACCGTC | |
| | TCCTCTGCTAGCACCAAAGGACCTAGTGTTTTTCCTCTTGCCCCTCAAGTGCAACTCCT | |
| | TGAAAGTGGAGGTGGCCTTGTCCAGCCAGGCGGTTCACTGCGTTTGAGCTGTGCCGCAT | |
| | CCGGCTTTACCTTTTCCAGTTACACAATGAGTTGGGTCCGTCAAGCACCCGGGCAATGT | |
| | TTGGAATGGATGGGAACTATTTCATCTGGTGGGACTTACACTTACTATCCCGATAGCGT | |
| | CAAGGGACGTTTTACCATAAGCCGGGACAACGCTAAAAATTCACTCTATCTTCAGATGA | |
| | ACAGTCTTAGGGCTGAGGATACCGCTGTTTATTATTGCGCCCGAGAAGCCATTTTCACC | |
| | TACTGGGGGCGCGGTACACTTGTCACCGTTAGCAGTGCTAGCACCAAAGGACCTAGTGT | |
| | TTTTCCTCTTGCCCCTTCCTCAAAGTCTACCTCTGGGGGGACAGCCGCTCTGGGCTGCC | |
| | TGGTCAAGGATTATTTCCCAGAGCCTGTCACTGTCAGTTGGAACTCTGGAGCCTTGACT | |
| | TCTGGTGTTCATACATTTCCTGCTGTCCTTCAAAGCAGCGGCTTGTACTCATTGTCTTC | |
| | TGTTGTGACAGTACCCTCAAGCAGCCTCGGCACTCAGACATACATCTGCAATGTCAACC | |
| | ACAAACCCTCAAATACAAAGGTAGATAAAAAAGTCGAACCAAAGTCTTGTGACAAAACT | |
| | CACACGTGCCCACCGTGCCCAGCACCTGAACTCCTGGGGGGACCGTCAGTCTTCCTCTT | |
| | CCCCCCAAAACCCAAGGACACCCTCATGATCTCCCGGACCCCTGAGGTCACATGCGTGG | |
| | TGGTGGACGTGAGCCACGAAGACCCTGAGGTCAAGTTCAACTGGTACGTGGACGGCGTG | |
| | GAGGTGCATAATGCCAAGACAAAGCCGCGGGAGGAGCAGTACAACAGCACGTACCGTGT | |
| | GGTCAGCGTCCTCACCGTCCTGCACCAGGACTGGCTGAATGGCAAGGAGTACAAGTGCA | |
| | AGGTCTCCAACAAAGCCCTCCCAGCCCCCATCGAGAAAACCATCTCCAAAGCCAAAGGG | |
| | CAGCCCCGAGAACCACAGGTGTACACCCTGCCCCCATGCCGGGAGGAGATGACCAAGAA | |
| | CCAGGTCAGCCTGTGGTGCCTGGTCAAAGGCTTCTATCCCAGCGACATCGCCGTGGAGT | |
| | GGGAGAGCAATGGGCAGCCGGAGAACAACTACAAGACCACGCCTCCCGTGCTGGACTCC | |
| | GACGGCTCCTTCTTCCTCTACAGCAAGCTCACCGTGGACAAGAGCAGGTGGCAGCAGGG | |
| | GAACGTCTTCTCATGCTCCGTGATGCATGAGGCTCTGCACAACCACTACACGCAGAAGA | |
| | GCCTCTCCCTGTCTCCGGGTAAA | |
| EPB12 LC | GCCATACAGCTGACTCAATCACCTTCTTCTTTGAGCGCCTCTGTCGGTGATCGCGTTAC | 551 |
| | AATTACATGCCGAGCTTCTCAGTCTATCTCTAATAACCTCCACTGGTATCTCCAGAAAC | |
| | CTGGACAGTCACCACAGCTTCTGATATATTACGGCTTTCAGTCTATAAGTGGAGTCCCA | |
| | AGTAGATTTTCCGGTAGTGGATCTGGCACCGATTTTACTCTTACTATCTCTAGCCTCCA | |
| | ACCTGAAGATTTCGCAACCTATTACTGCCAGCAGGCCAATTCCTGGCCCTTGACCTTCG | |
| | GAGGTGGGACTAAGCTGGAAATCAAACGTACGGTGGCAGCTCCCAGCGTTTTTATCTTT | |
| | CCCCCAGACATACAACTCACACAAAGTCCAAGCTCTCTTTCCCTTAGTCCAGGAGAACG | |
| | CGTAACTCTCTCATGTAAAGCCTCCCAGGATATCAATAACTATCTCTCTTGGTACCAAC | |
| | AAAAGCCTGACCAAGCTCCTAAGCTGCTTATCAAACGCGCCAATCGGTTGGTAGACGGA | |
| | GTTCCCGACAGGTTCAGTGGGTCAGGCTCAGGTACAGATTTTACCTTGAAGATATCACG | |
| | CGTGGAAGCCGAAGACGTAGGGGTATATTATTGTCTGAAATATGACGAGTTCCCCTATA | |
| | CTTTTGGGTGTGGAACTCGCCTGGAAATAAAACGTACGGTGGCAGCTCCCAGCGTTTTT | |
| | ATCTTTCCCCCATCCGACGAGCAGCTCAAGAGTGGCACTGCCTCTGTAGTTTGTTTGCT | |
| | GAATAACTTCTATCCACGTGAAGCAAAAGTACAGTGGAAGGTCGATAATGCCCTTCAGA | |
| | GCGGTAACAGCCAAGAAAGTGTTACCGAGCAAGATTCCAAAGATTCCACTTACAGTCTG | |
| | TCCAGCACATTGACACTGAGTAAGGCTGATTACGAAAAACACAAGGTGTACGCATGCGA | |
| | GGTGACACACCAAGGTCTTTCATCTCCTGTAACTAAGAGCTTTAACCGGGGAGAATGTG | |
| | GTGGTGGGGGCAGCGGGGGCGGAGGTAGTGGAGGCGGCGGTAGTGAACCAAAGAGTAGT | |
| | GACAAAACTCACACGTGCCCACCGTGCCCAGCACCTGAACTCCTGGGGGGACCGTCAGT | |
| | CTTCCTCTTCCCCCCAAAACCCAAGGACACCCTCATGATCTCCCGGACCCCTGAGGTCA | |
| | CATGCGTGGTGGTGGACGTGAGCCACGAAGACCCTGAGGTCAAGTTCAACTGGTACGTG | |
| | GACGGCGTGGAGGTGCATAATGCCAAGACAAAGCCGCGGGAGGAGCAGTACAACAGCAC | |
| | GTACCGTGTGGTCAGCGTCCTCACCGTCCTGCACCAGGACTGGCTGAATGGCAAGGAGT | |
| | ACAAGTGCAAGGTCTCCAACAAAGCCCTCCCAGCCCCCATCGAGAAAACCATCTCCAAA | |
| | GCCAAAGGGCAGCCCCGAGAACCACAGGTGTACACCCTGCCCCCATGCCGGGAGGAGAT | |
| | GACCAAGAACCAGGTCAGCCTGTGGTGCCTGGTCAAAGGCTTCTATCCCAGCGACATCG | |
| | CCGTGGAGTGGGAGAGCAATGGGCAGCCGGAGAACAACTACAAGACCACGCCTCCCGTG | |
| | CTGGACTCCGACGGCTCCTTCTTCCTCTACAGCAAGCTCACCGTGGACAAGAGCAGGTG | |
| | GCAGCAGGGGAACGTCTTCTCATGCTCCGTGATGCATGAGGCTCTGCACAACCACTACA | |
| | CGCAGAAGAGCCTCTCCCTGTCTCCGGGTAAA | |

[0375] Table 52 below shows the polypeptide sequences of the heavy chain variable region (VH) and light chain variable region (VL) of the engineered antibodies targeting EphA2. Table 53 below shows the nucleotide sequences of the heavy chain variable region (VH) and light chain variable region (VL) of the engineered antibodies targeting EphA2.

TABLE 52

| | | | SEQ ID |
|---|---|---|---|
| Name | | Sequence | NO |
| EPB01 | VH1 | EVQLLESGGGLVQPGGSLRLSCAASGFTFSRYQMMWVRQAPGKGLEWVSSISPSGGVTLYA | 135 |
| | | DSVKGRFTISRDNSKNTLYLQMNSLRAEDTAVYYCTRELLGTVVVPVAWKMRGYFDYWGQL | |
| | | TLVTVSS | |
| | VH2 | EVQLLESGGGLVQPGGSLRLSCAASGFTFSHYMMAWVRQAPGKCLEWVSRIGPSGGPTHYA | 136 |
| | | DSVKGRFTISRDNSKNTLYLQMNSLRAEDTAVYYCAGYDSGYDYVAVAGPAEYFQHWGQGT | |
| | | LVTVSS | |
| | VL1 | DIQMTQSPGTLSVSPGERATLSCRASQSVSSNLAWYQQKPGQAPRLLIYGASTRATGIPAR | 137 |
| | | FSGSGSGTEFTLTISSMQSEDFAVYYCQQYNNWPPLTFGGGTKVEIK | |
| | VL2 | DIQMTQSPSSLSASVGDRVTITCRASQSISTWLAWYQQKPGKAPKLLIYKASNLHTGVPSR | 138 |
| | | FSGSGSGTEFSLTISGLQPDDFATYYCQQYNSYSRTFGCGTKVEIK | |
| EPB02 | VH1 | EVQLVESGGGVVRPGGSLRLSCAASGFTVSDYSMNWVRQAPGKGLEWIGFIRNKANAYTTE | 130 |
| | | YSASVKGRFTISRDDSKNTLYLQMNSLKTEDTAVYYCTTYPRYHAMDSWGQGTMVTVSS | |
| | VH2 | EVQLLESGGGLVQPGGSLRLSCAASGFTFSHYMMAWVRQAPGKCLEWVSRIGPSGGPTHYA | 136 |
| | | DSVKGRFTISRDNSKNTLYLQMNSLRAEDTAVYYCAGYDSGYDYVAVAGPAEYFQHWGQGT | |
| | | LVTVSS | |
| | VL1 | AIQLTQSPSSLSASVGDRVTITCRASQSISNNLHWYLQKPGQSPQLLIYYGFQSISGVPSR | 140 |
| | | FSGSGSGTDFTLTISSLQPEDFATYYCQQANSWPLTFGGGTKLEIK | |
| | VL2 | DIQMTQSPSSLSASVGDRVTITCRASQSISTWLAWYQQKPGKAPKLLIYKASNLHTGVPSR | 138 |
| | | FSGSGSGTEFSLTISGLQPDDFATYYCQQYNSYSRTFGCGTKVEIK | |
| EPB03 | VH1 | QVQLLESGGGLVQPGGSLRLSCAASGFTFSSYTMSWVRQAPGQALEWMGTISSGGTYTYYP | 141 |
| | | DSVKGRFTISRDNAKNSLYQMNSLRAEDTAVYYCAREAIFTYWGRGTLVTVSS | |
| | VH2 | EVQLLESGGGLVQPGGSLRLSCAASGFTFSHYMMAWVRQAPGKCLEWVSRIGPSGGPTHYA | 136 |
| | | DSVKGRFTISRDNSKNTLYLQMNSLRAEDTAVYYCAGYDSGYDYVAVAGPAEYFQHWGQGT | |
| | | LVTVSS | |
| | VL1 | DIQLTQSPSSLSLSPGERVTLSCKASQDINNYLSWYQQKPDQAPKLLIKRANRLVDGVPDR | 142 |
| | | FSGSGSGTDFTLKISRVEAEDVGVYYCLKYDEFPYTFGQGTRLEIK | |
| | VL2 | DIQMTQSPSSLSASVGDRVTITCRASQSISTWLAWYQQKPGKAPKLLIYKASNLHTGVPSR | 138 |
| | | FSGSGSGTEFSLTISGLQPDDFATYYCQQYNSYSRTFGCGTKVEIK | |
| EPB04 | VH1 | EVQLLESGGGLVQPGGSLRLSCAASGFTFSHYMMAWVRQAPGKGLEWVSRIGPSGGPTHYA | 143 |
| | | DSVKGRFTISRDNSKNTLYLQMNSLRAEDTAVYYCAGYDSGYDYVAVAGPAEYFQHWGQGT | |
| | | LVTVSS | |
| | VH2 | EVQLLESGGGLVQPGGSLRLSCAASGFTFSRYQMMWYRQAPGKCLEWVSSISPSGGVTLYA | 144 |
| | | DSVKGRFTISRDNSKNTLYLQMNSLRAEDTAVYYCTRELLGTVVVPVAWKMRGYFDYNGQL | |
| | | TLVTVSS | |
| | VL1 | DIQMTQSPSSLSASVGDRVTITCRASQSISTWLAWYQQKPGKAPKLLIYKASNLHTGVPSR | 145 |
| | | FSGSGSGTEFSLTISGLQPDDFATYYCQQYNSYSRTFGQGTKVEIK | |
| | VL2 | DIQMTQSPGTLSVSPGERATLSCRASQSVSSNLAWYQQKPDQAPRLLIYGASTRATGIPAR | 146 |
| | | FSGSGSGTEFTLTISSMQSEDFAVYYCQQYNNWPPLTFGCGTKVEIK | |
| EPB06 | VH1 | EVQLLESGGGLVQPGGSLRLSCAASGFTFSHYMMAWVRQAPGKGLEWVSRIGPSGGPTHYA | 143 |
| | | DSVKGRFTISRDNSKNTLYLQMNSLRAEDTAVYYCAGYDSGYDYVAVAGPAEYFQHWGQGT | |
| | | LVTVSS | |
| | VH2 | EVQLVESGGGVVRPGGSLRLSCAASGFTVSDYSMNWVRQAPGKCLEWIGFIRNKANAYTTE | 147 |
| | | YSASVKGRFTISRDDSKNTLYLQMNSLKTEDTAVYYCTTYPRYHAMDSWGQGTMYTVSS | |
| | VL1 | DIQMTQSPSSLSASVGDRVTITCRASQSISTWLAWYQQKPGKAPKLLIYKASNLHTGVPSR | 145 |
| | | FSGSGSGTEFSLTISGLQPDDFATYYCQQYNSYSRTFGQGTKVEIK | |
| | VL2 | AIQLTQSPSSLSASVGDRYTITCRASQSISNNLHWYLQKPGQSPQLLIYYGFQSISGVPSR | 148 |
| | | FSGSGSGTDFTLTISSLQPEDFATYYCQQANSWPLTFGCGTKLEIK | |
| EPB06 | VH1 | EVQLLESGGGLVQPGGSLRLSCAASGFTFSHYMMAWVRQAPGKGLEWVSRIGPSGGPTHYA | 143 |
| | | DSVKGRFTISRDNSKNTLYLQMNSLRAEDTAVYYCAGYDSGYDYVAVAGPAEYFQHWGQGT | |
| | | LVTVSS | |
| | VH2 | QVQLLESGGGLYQPGGSLRLSCAASGFTFSSYTMSWYRQAPGQCLEWMGTISSGGTYTYYP | 149 |
| | | DSVKGRFTISRDNAKNSLYLQMNSLRAEDTAVYYCAREAIFTYWGRGTLVTVSS | |
| | VL1 | DIQMTQSPSSLSASVGDRVTITCRASQSISTWLAWYQQKPGKAPKLLIYKASNLHTGVPSR | 145 |
| | | FSGSGSGTEFSLTISGLQPDDFATYYCQQYNSYSRTFGQGTKVEIK | |
| | VL2 | DIQLTQSPSSLSLSPGERVTLSCKASQDINNYLSWYQQKPDQAPKLLIKRANRLVDGVPDR | 150 |
| | | FSGSGSGTDFTLKISRVEARDVGVYYCLKYDEFPYTFGCGTRLEIK | |
| EPB07 | VH1 | EVQLVESGGGVVRPGGSLRSLSCAASGTFVSDYSMNWVRQAPGLGLEWIGFIRNKANATTTE | 139 |
| | | YSASVKGRFTISRDDSKNTLYLQMNSLKTEDTAVYYCTTYPKYHAMDSWGQGTMVTVSS | |
| | VH2 | EVQLLESGGGLVQPGGSLRLSCAASGFTFSRYQMMWYRQAPGKCLEWVSSISPSGGVTLYA | 144 |
| | | DSVKGRFTISRDNSKNTLYLQMNSLRAEDTAVYYCTRELLGTVVVPVAWKMRGYFDYNGQL | |
| | | TLVTVSS | |
| | VL1 | AIQLTQSPSSLSASVGDRVTITCRASQSISNNLHWYLQKPGQSPQLLIYYGFQSISGVPSR | 140 |
| | | FSGSGSGTDFTLTISSLQPEDFATYYCQQANSWPLTFGGGTKLEIK | |
| | VL3 | DIQMTQSPGTLSVSPGERATLSCRASQSVSSNLAWYQQKPDQAPRLLIYGASTRATGIPAR | 146 |
| | | FSGSGSGTEFTLTISSMQSEDFAVYYCQQYNNWPPLTFGCGTKVEIK | |
| EPB08 | VH1 | QVQLLESGGGLVQPGGSLRLSCAASGFTFSSYTMSWVRQAPGQALEWMGTISSGGTYTYYP | 141 |
| | | DSVKGRFTISRDNAKNSLYQMNSLRAEDTAVYYCAREAIFTYWGRGTLVTVSS | |
| | VH2 | EVQLLESGGGLVQPGGSLRLSCAASGFTFSRYQMMWYRQAPGKCLEWVSSISPSGGVTLYA | 144 |
| | | DSVKGRFTISRDNSKNTLYLQMNSLRAEDTAVYYCTRELLGTVVVPVAWKMRGYFDYNGQL | |
| | | TLVTVSS | |
| | VL1 | DIQLTQSPSSLSLSPGERVTLSCKASQDINNYLSWYQQKPDQAPKLLIKRANRLVDGVPDR | 142 |
| | | FSGSGSGTDFTLKISRVEAEDVGVYYCLKYDEFPYTFGQGTRLEIK | |
| | VL2 | DIQMTQSPGTLSVSPGERATLSCRASQSVSSNLAWYQQKPDQAPRLLIYGASTRATGIPAR | 146 |
| | | FSGSGSGTEFTLTISSMQSEDFAVYYCQQYNNWPPLTFGCGTKVEIK | |
| EPB09 | VH1 | EVQLLESGGGLVQPGGSLRLSCAASGFTFSRYQMMWVRQAPGKGLEWVSSISPSGGVTLYA | 135 |
| | | DSVKGRFTISRDNSKNTLYLQMNSLRAEDTAVYYCTRELLGTVVVPVAWKMRGYFDYWGQL | |
| | | TLVTVSS | |
| | VH2 | EVQLVESGGGVVRPGGSERLSCAASGFTVSDYSMNWVRQAPGKCLEWIGFIRNKANAYTTE | 147 |
| | | YSASVKGRFTISRDDSKNTLYLQMNSLKTEDTAVYYCTTYPRYHAMDSWGQGTMVTVSS | |
| | | DIQMTQSPGTLSVSPGERATLSCRASQSVSSNLAWYQQKPGQAPRLLIYGASTRATGIPAR | 137 |
| | | FSGSGSGTEFTLTISSMQSEDFAVYYCQQYNNWPPLTFGGGTKVEIK | |
| | VL2 | AIQLTQSPSSLSASVGDRYTITCRASQSISNNLHWYLQKPGQSPQLLIYYGFQSISGVPSR | 148 |
| | | FSGSGSGTDFTLTISSLQPEDFATYYCQQANSWPLTFGCGTKLEIK | |
| EPB10 | VH1 | QVQLLESGGGLVQPGGSLRLSCAASGFTFSSYTMSWVRQAPGQALEWMGTISSGGTYTYYP | 141 |
| | | DSVKGRFTISRDNAKNSLYQMNSLRAEDTAVYYCAREAIFTYWGRGTLVTVSS | |
| | VH2 | EVQLVESGGGVVRPGGSLRLSCAASGFTVSDYSMNWVRQAPGKCLEWIGFIRNKANAYTTE | 147 |
| | | YSASVKGRFTISKDDSKNTLYLQMNSLKTEDTAVYYCTTYPRYHAMDSWGQGTMVTVSS | |
| | VL1 | DIQLTQSPSSLSLSPGERVTLSCKASQDINNYLSWYQQKPDQAPKLLIKRANRLVDGVPDR | 142 |
| | | FSGSGSGTDFTLKISRVEAEDVGVYYCLKYDEFPYTFGQGTRLEIK | |
| | VL2 | AIQLTQSPSSLSASVGDRVTITCRASQSISNNLHWYLQKPGQSPQLLIYYGFQSISGVPSR | 148 |
| | | FSGSGSGTDFTLTISSLQPEDFATYYCQQANSWPLTFGCGTKLEIK | |
| EPB11 | VH1 | EVQLLESGGGLVQPGGSLRLSCAASGFTFSRYQMMWVRQAPGKGLEWVSSISPSGGVTLYA | 135 |
| | | DSVKGRFTISRDNSKNTLYLQMNSLRAEDTAVYYCTRELLGTVVVPVAWKMRGYFDYWGQL | |
| | | TLVTVSS | |
| | VH2 | QVQLLESGGGLYQPGGSLRLSCAASGFTFSSYTMSWYRQAPGQCLEWMGTISSGGTYTYYP | 149 |
| | | DSVKGRFTISRDNAKNSLYLQMNSLRAEDTAVYYCAREAIFTYWGRGTLVTVSS | |
| | VL1 | DIQMTQSPGTLSVSPGERATLSCRASQSVSSNLAWYQQKPGQAPRLLIYGASTRATGIPAR | 137 |
| | | FSGSGSGTEFTLTISSMQSEDFAVYYCQQYNNWPPLTFGGGTKVEIK | |
| | VL2 | DIQLTQSPSSLSLSPGERVTLSCKASQDINNYLSWYQQKPDQAPKLLIKRANRLVDGVPDR | 150 |
| | | FSGSGSGTDFTLKISRVEARDVGVYYCLKYDEFPYTFGCGTRLEIK | |
| EPB12 | VH1 | EVQLVESGGGVVRPGGSLRLSCAASGFTVSDYSMNWVRQAPGKGLEWIGFIRNKANAYTTE | 130 |
| | | YSASVKGRFTISRDDSKNTLYLQMNSLKTEDTAVYYCTTYPRYHAMDSWGQGTMVTVSS | |
| | VH2 | QVQLLESGGGLYQPGGSLRLSCAASGFTFSSYTMSWYRQAPGQCLEWMGTISSGGTYTYYP | 149 |
| | | DSVKGRFTISRDNAKNSLYLQMNSLRAEDTAVYYCAREAIFTYWGRGTLVTVSS | |
| | VL1 | AIQLTQSPSSLSASVGDRVTITCRASQSISNNLHWYLQKPGQSPQLLIYYGFQSISGVPSR | 140 |
| | | FSGSGSGTDFTLTISSLQPEDFATYYCQQANSWPLTFGGGTKLEIK | |
| | VL2 | DIQLTQSPSSLSLSPGERVTLSCKASQDINNYLSWYQQKPDQAPKLLIKRANRLVDGVPDR | 150 |
| | | FSGSGSGTDFTLKISRVEARDVGVYYCLKYDEFPYTFGCGTRLEIK | |

TABLE 53

| | | | SEQ |
|---|---|---|---|
| | | | ID |
| Name | | Sequence | NO |
| EPB01 | VH1 | GAGGTGCAACTGCTTGAGTCAGGAGGAGGACTGGTTCAACCCGGGGGGAGCCTTCGACTCT | 552 |
| | | CATGTGCAGCCTCTGGGTTTACATTTAGTCGTTACCAAATGATGTGGGTACGCCAGGCCCC | |
| | | CGGAAAAGGTTTGGAGTGGGTGAGCAGCATTTCTCCTTCAGGAGGAGTGACACTTTACGCA | |
| | | GACAGTGTTAAGGGTCGGTTCACAATCAGTCGTGATAATTCCAAGAACACTCTCTATCTCC | |
| | | AAATGAACTCCCTTCGAGCTGAGGACACTGCTGTTTATTACTGTACTCGGGAACTTCTCGG | |
| | | CACTGTGGTTGTTCCTGTGGCTTGGAAGATGCGTGGATACTTCGACTATTGGGGGCAACTC | |
| | | ACTCTTGTTACCGTCTCAAGC | |
| | VH2 | GAGGTTCAACTCCTTGAATCCGGAGGAGGACTTGTCCAACCAGGCGGCAGCCTTAGGCTGT | 553 |
| | | CCTGCGCTGCCTCAGGCTTTACATTCAGTCATTACATGATGGCCTGGGTTAGACAGGCACC | |
| | | CGGCAAATGTCTGGAATGGGTCAGCCGAATAGGACCATCAGGAGGTCCCACTCACTATGCC | |
| | | GATTCTGTAAAAGGGAGGTTTACAATTTCCAGAGACAATTCAAAGAATACCCTTTACCTCC | |
| | | AGATGAACTCATTGAGAGCCGAGGACACAGCCGTATATTATTGCGCAGGTTATGATTCCGG | |
| | | TTACGATTACGTTGCAGTCGCAGGCCCAGCCGAATACTTCCAACATTGGGGTCAGGGAACC | |
| | | CTCGTGACCGTGTCCAGT | |
| | VL1 | GACATACAGATGACTCAGAGCCCTGGTACACTGAGTGTATCTCCTGGGGAACGCGCCACTC | 554 |
| | | TGTCTTGCCGAGCCTCTCAAAGCGTTAGTTCCAACCTGGCTTGGTATCAGCAAAAACCCGG | |
| | | TCAAGCACCTCGCTTGCTTATCTACGGGGCCTCCACACGGGCAACCGGCATTCCTGCACGC | |
| | | TTTAGTGGCTCTGGTAGCGGGACTGAATTCACTTTGACTATATCTTCCATGCAGAGTGAGG | |
| | | ATTTCGCCGTTTATTATTGTCAACAGTACAATAACTGGCCTCCACTCACTTTTGGTGGTGG | |
| | | CACCAAAGTGGAGATAAAG | |
| | VL2 | GACATACAGATGACACAAAGTCCAAGTAGCCTTTCTGCATCCGTTGGAGACCGCGTAACCA | 556 |
| | | TAACTTGTCGAGCATCACAAAGCATAAGCACTTGGCTTGCTTGGTATCAGCAGAAGCCAGG | |
| | | CAAAGCACCCAAGCTGCTGATTTATAAAGCCTCTAATCTCCATACAGGAGTTCCCAGCCGT | |
| | | TTCTCAGGCAGCGGGTCTGGAACCGAATTCTCTCTGACCATCTCTGGCTTGCAACCTGATG | |
| | | ACTTTGCAACATATTACTGTCAACAATATAATTCATATAGTCGTACTTTCGGGTGTGGCAC | |
| | | TAAGGTGGAAATCAAA | |
| EPB02 | VH1 | GAGGTCCAGCTGGTTGAGTCTGGAGGTGGTGTAGTCAGGCCAGGAGGTTCCCTGCGTCTGT | 556 |
| | | CTTGCGCTGCCTCTGGGTTCACTGTGTCTGACTACAGTATGAACTGGGTTAGACAGGCTCC | |
| | | AGGGAAAGGTTTGGAATGGATAGGGTTTATTCGCAATAAAGCCAATGCCTATACCACCGAA | |
| | | TACAGCGCAAGCGTTAAAGGCAGGTTCACCATCAGTAGGGACGACTCTAAGAATACCCTCT | |
| | | ACCTGCAGATGAATAGCTTGAAGACAGAGGATACCGCTGTTTATTACTGCACTACCTACCC | |
| | | CAGGTATCATGCTATGGACAGTTGGGGTCAAGGAACTATGGTCACCGTCTCCTCT | |
| | VH2 | GAGGTTCAACTCCTTGAATCCGGAGGAGGACTTGTCCAACCAGGGGGCAGCCTTAGGCTGT | 553 |
| | | CCTGCGCTGCCTCAGGCTTTACATTCAGTCATTACATGATGGCCTGGGTTAGACAGGCACC | |
| | | CGGCAAATGTCTGGAATGGGTCAGCCGAATAGGACCATCAGGAGGTCCCACTCACTATGCC | |
| | | GATTCTGTAAAAGGGAGGTTTACAATTTCCAGAGACAATTCAAAGAATACCCTTTACCTCC | |
| | | AGATGAACTCATTGAGAGCCGAGGACACAGCCGTATATTATTGCGCAGGTTATGATTCCGG | |
| | | TTACGATTACGTTGCAGTCGCAGGCCCAGCCGAATACTTCCAACATTGGGGTCAGGGAACC | |
| | | CTCGTGACCGTGTCCAGT | |
| | VL1 | GCCATACAGCTGACTCAATCACCTTCTTCTTTGAGCGCCTCTGTCGGTGATCGCGTTACAA | 557 |
| | | TTACATGCCGAGCTTCTCAGTCTATCTCTAATAACCTCCACTGGTATCTCCAGAAACCTGG | |
| | | ACAGTCACCACAGCTTCTGATATATTACGGCTTTCAGTCTATAAGTGGAGTCCCAAGTAGA | |
| | | TTTTCCGGTAGTGGATCTGGCACCGATTTTACTCTTACTATCTCTAGCCTCCAACCTGAAG | |
| | | ATTTCGCAACCTATTACTGCCAGCAGGCCAATTCCTGGCCCTTGACCTTCGGAGGTGGGAC | |
| | | TAAGCTGGAAATCAAA | |
| | VL2 | GACATACAGATGACACAAAGTCCAAGTAGCCTTTCTGCATCCGTTGGAGACCGCGTAACCA | 556 |
| | | TAACTTGTCGAGCATCACAAAGCATAAGCACTTGGCTTGCTTGGTATCAGCAGAAGCCAGG | |
| | | CAAAGCACCCAAGCTGCTGATTTATAAAGCCTCTAATCTCCATACAGGAGTTCCCAGCCGT | |
| | | TTCTCAGGCAGCGGGTCTGGAACCGAATTCTCTCTGACCATCTCTGGCTTGCAACCTGATG | |
| | | ACTTTGCAACATATTACTGTCAACAATATAATTCATATAGTCGTACTTTCGGGTGTGGCAC | |
| | | TAAGGTGGAAATCAAA | |
| EPB03 | VH1 | CAAGTGCAACTCCTTGAAAGTGGAGGTGGCCTTGTCCAGCCAGGCGGTTCACTGCGTTTGA | 558 |
| | | GCTGTGCCGCATCCGGCTTTACCTTTTCCAGTTACACAATGAGTTGGGTCCGTCAAGCACC | |
| | | CGGGCAAGCTTTGGAATGGATGGGAACTATTTCATCTGGTGGGACTTACACTTACTATCCC | |
| | | GATAGCGTCAAGGGACGTTTTACCATAAGCCGGGACAACGCTAAAAATTCACTĆTATCTTC | |
| | | AGATGAACAGTCTTAGGGCTGAGGATACCGCTGTTTATTATTGCGCCCGAGAAGCCATTTT | |
| | | CACCTACTGGGGGCGCGGTACACTTGTCACCGTTAGCAGT | |
| | VH2 | GAGGTTCAACTCCTTGAATCCGGAGGAGGACTTGTCCAACCAGGCGGCAGCCTTAGGCTGT | 553 |
| | | CCTGCGCTGCCTCAGGCTTTACATTCAGTCATTACATGATGGCCTGGGTTAGACAGGCACC | |
| | | CGGCAAATGTCTGGAATGGGTCAGCCGAATAGGACCATCAGGAGGTCCCACTCACTATGCC | |
| | | GATTCTGTAAAAGGGAGGTTTACAATTTCCAGAGACAATTCAAAGAATACCCTTTACCTCC | |
| | | AGATGAACTCATTGAGAGCCGAGGACACAGCCGTATATTATTGCGCAGGTTATGATTCCGG | |
| | | TTACGATTACGTTGCAGTCGCAGGCCCAGCCGAATACTTCCAACATTGGGGTCAGGGAACC | |
| | | CTCGTGACCGTGTCCAGT | |
| | VL1 | GACATACAACTCACACAAAGTCCAAGCTCTCTTTCCCTTAGTCCAGGAGAACGCGTAACTC | 559 |
| | | TCTCATGTAAAGCCTCCCAGGATATCAATAACTATCTCTCTTGGTACCAACAAAAGCCTGA | |
| | | CCAAGCTCCTAAGCTGCTTATCAAACGCGCCAATCGGTTGGTAGACGGAGTTCCCGACAGG | |
| | | TTCAGTCGGTCAGCCTCAGGTACAGATTTTACCTTGAAGATATCACGCGTGGAAGCCGAAG | |
| | | ACGTAGGGGTATATTATTGTCTGAAATATGACGAGTTCCCCTATACTTTTGGGCAAGGAAC | |
| | | TCGCCTGGAAATAAAA | |
| | VL2 | GACATACAGATGACACAAAGTCCAAGTAGCCTTTCTGCATCCGTTGGAGACCGCGTAACCA | 556 |
| | | TAACTTGTCGAGCATCACAAAGCATAAGCACTTGGCTTGCTTGGTATCAGCAGAAGCCAGG | |
| | | CAAAGCACCCAAGCTGCTGATTTATAAAGCCTCTAATCTCCATACAGGAGTTCCCAGCCGT | |
| | | TTCTCAGGCAGCGGGTCTGGAACCGAATTCTCTCTGACCATCTCTGGCTTGCAACCTGATG | |
| | | ACTTTGCAACATATTACTGTCAACAATATAATTCATATAGTCGTACTTTCGGGTGTGGCAC | |
| | | TAAGGTGGAAATCAAA | |
| EPB04 | VH1 | GAGGTACAGTTGCTGGAGTCAGGAGGTGGATTGGTCCAACCCGGAGGATCTCTTCGTCTGT | 450 |
| | | CCTGCGCCGCCTCAGGATTTACCTTCTCTCATTATATGATGGCATGGGTACGTCAGGCTCC | |
| | | AGGCAAAGGTCTGGAATGGGTTAGTCGGATTGGTCCCTCAGGGGGTCCTACCCATTATGCC | |
| | | GATTCTGTAAAGGGCCGTTTTACCATAAGCAGAGACAACTCTAAGAACACCCTTTACCTTC | |
| | | AGATGAATAGCCTGAGGGCTGAGGATACCGCAGTGTATTACTGCGCAGGCTATGACTCTGG | |
| | | GTACGACTATGTCGCCGTAGCAGGACCTGCCGAGTATTTTCAACACTGGGGACAGGGGACC | |
| | | CTTGTCACAGTTTCTAGT | |
| | VH2 | GAGGTGCAACTGCTTGAGTCAGGAGGAGGACTGGTTCAACCCGGCGGGAGCCTTCGACTCT | 560 |
| | | CATGTGCAGCCTCTGGGTTTACATTTAGTCGTTACCAAATGATGTGGGTACGCCAGGCCCC | |
| | | CGGAAAATGTTTGGAGTGGGTGAGCAGCATTTCTCCTTCAGGAGGAGTGACACTTTACGCA | |
| | | GACAGTGTTAAGGGTCGGTTCACAATCAGTCGTGATAATTCCAAGAACACTCTCTATCTCC | |
| | | AAATGAACTCCCTTCGAGCTGAGGACACTGCTGTTTATTACTGTACTCGGGAACTTCTCGG | |
| | | CACTGTGGTTGTTCCTGTGGCTTGGAAGATGCGTGGATACTTCGACTATTGGGGGCAACTC | |
| | | ACTCTTGTTACCGTCTCAAGC | |
| | VL1 | GATATTCAAATGACACAAAGCCCAAGTTCCTTGTCCGCCTCAGTTGGTGATCGTGTGACAA | 451 |
| | | TAACCTGTCGGGCTTCACAATCCATATCTACATGGCTGGCTTGGTACCAGCAAAAGCCAGG | |
| | | TAAAGCCCCAAAACTCCTGATTTACAAGGCAAGTAACTTGCATACTGGGGTACCCAGCCGT | |
| | | TTCTCTGGGTCAGGCTCTGGGACAGAGTTTAGTCTTACAATTTCTGGTCTGCAACCCGATG | |
| | | ACTTCGCTACCTATTACTGTCAACAATATAATAGTTATTCTCGAACATTTGGTCAGGGAAC | |
| | | AAAAGTGGAAATCAAA | |
| | VL2 | GACATACAGATGACTCAGAGCCCTGGTACACTGAGTGTATCTCCTGGGGAACGCGCCACTC | 561 |
| | | TGTCTTGCCGAGCCTCTCAAAGCGTTAGTTCCAACCTGGCTTGGTATCAGCAAAAACCCGG | |
| | | TCAAGCACCTCGCTTGCTTATCTACGGGGCCTCCACACGGGCAACCGGCATTCCTGCACGC | |
| | | TTTAGTGGCTCTGGTAGCGGGACTGAATTCACTTTGACTATATCTTCCATGCAGAGTGAGG | |
| | | ATTTCGCCGTTTATTATTGTCAACAGTACAATAACTGGCCTCCACTCACTTTTGGTTGTGG | |
| | | CACCAAAGTGGAGATAAAG | |
| EPB05 | VH1 | GAGGTACAGTTGCTGGAGTCAGGAGGTGGATTGGTCCAACCCGGAGGATCTCTTCGTCTGT | 450 |
| | | CCTGCGCCGCCTCAGGATTTACCTTCTCTCATTATATGATGGCATGGGTACGTCAGGCTCC | |
| | | AGGCAAAGGTCTGGAATGGGTTAGTCGGATTGGTCCCTCAGGGGGTCCTACCCATTATGCC | |
| | | GATTCTGTAAAGGGCCGTTTTACCATAAGCAGAGACAACTCTAAGAACACCCTTTACCTTC | |
| | | AGATGAATAGCCTGAGGGCTGAGGATACCGCAGTGTATTACTGCGCAGGCTATGACTCTGG | |
| | | GTACGACTATGTCGCCGTAGCAGGACCTGCCGAGTATTTTCAACACTGGGGACAGGGGACC | |
| | | CTTGTCACAGTTTCTAGT | |
| | VH2 | GAGGTCCAGCTGGTTGAGTCTGGAGGTGGTGTAGTCAGGCCAGGAGGTTCCCTGCGTCTGT | 562 |
| | | CTTGCGCTGCCTCTGGGTTCACTGTGTCTGACTACAGTATGAACTCGGTTAGACAGGCTCC | |
| | | AGGGAAATGTTTGGAATGGATAGGGTTTATTCGCAATAAAGCCAATGCCTATACCACCGAA | |
| | | TACAGCGCAAGCGTTAAAGGCAGGTTCACCATCAGTAGGGACGACTCTAAGAATACCCTCT | |
| | | ACCTGCAGATGAATAGCTTGAAGACAGAGGATACCGCTGTTTATTACTGCACTACCTACCC | |
| | | CAGGTATCATGCTATGGACAGTTGGGGTCAAGGAACTATGGTCACCGTCTCCTCT | |
| | VL1 | GATATTCAAATGACACAAAGCCCAAGTTCCTTGTCCGCCTCAGTTGGTGATCGTGTGACAA | 461 |
| | | TAACCTGTCGGGCTTCACAATCCATATCTACATGGCTGGCTTGGTACCAGCAAAAGCCAGG | |
| | | TAAAGCCCCAAAACTCCTGATTTACAAGGCAAGTAACTTGCATACTGGGGTACCCAGCCGT | |
| | | TTCTCTGGGTCAGGCTCTGGGACAGAGTTTAGTCTTACAATTTCTGGTCTGCAACCCGATG | |
| | | ACTTCGCTACCTATTACTGTCAACAATATAATAGTTATTCTCGAACATTTGGTCAGGGAAC | |
| | | AAAAGTGGAAATCAAA | |
| | VL2 | GCCATACAGCTGACTCAATCACCTTCTTCTTTGAGCGCCTCTGTCGGTGATCGCGTTACAA | 563 |
| | | TTACATGCCGAGCTTCTCAGTCTATCTCTAATAACCTCCACTGGTATCTCCAGAAACCTGG | |
| | | ACAGTCACCACAGCTTCTGATATATTACGGCTTTCAGTCTATAAGTGGAGTCCCAAGTAGA | |
| | | TTTTCCGGTAGTGGATCTGGCACCGATTTTACTCTTACTATCTCTAGCCTCCAACCTGAAG | |
| | | ATTTCGCAACCTATTACTGCCAGCAGGCCAATTCCTGGCCCTTGACCTTCGGATGTGGGAC | |
| | | TAAGCTGGAAATCAAA | |
| EPB06 | VH1 | GAGGTACAGTTGCTGGAGTCAGGAGGTGGATTGGTCCAACCCGGAGGATCTCTTCGTCTGT | 450 |
| | | CCTGCGCCGCCTCAGGATTTACCTTCTCTCATTATATGATGGCATGGGTACGTCAGGCTCC | |
| | | AGGCAÀAGGTCTGGAATGGGTTAGTCGGATTGGTCCCTCAGGGGGTCCTACCCATTATGCC | |
| | | GATTCTGTAAAGGGCCGTTTTACCATAAGCAGAGACAACTCTAAGAACACCCTTTACCTTC | |
| | | AGATGAATAGCCTGAGGCCTGAGGATACCGCAGTGTATTACTGCGCAGGCTATGACTCTGG | |
| | | GTACGACTATGTCGCCGTAGCAGGACCTGCCGAGTATTTCAACACTGGGGACAGGGGACC | |
| | | CTTGTCACAGTTTCTAGT | |
| | VH2 | CAAGTGCAACTCCTTGAAAGTGGAGGTGGCCTTGTCCAGCCAGGCGGTTCACTGCGTTTGA | 564 |
| | | GCTGTGCCGCATCCGGCTTTACCTTTTCCAGTTACACAATGAGTTGGGTCCGTCAAGCACC | |
| | | CGGGCAATGTTTGGAATGGATGGGAACTATTTCATCTGGTGGGACTTACACTTACTATCCC | |
| | | GATAGCGTCAAGGGACGTTTTACCATAAGCCGGGACAACGCTAAAAATTCACTCTATCTTC | |
| | | AGATGAACAGTCTTAGGGCTGAGGATACCGCTGTTTATTATTGCGCCCGAGAAGCCATTTT | |
| | | CACCTACTGGGGGCGCGGTACACTTGTCACCGTTAGCAGT | |
| | VL1 | GATATTCAAATGACACAAAGCCCAAGTTCCTTGTCCGCCTCAGTTGGTGATCGTGTGACAA | 451 |
| | | TAACCTGTCGGGCTTCACAATCCATATCTACATGGCTGGCTTGGTACCAGCAAAAGCCAGG | |
| | | TAAAGCCCCAAAACTCCTGATTTACAAGGCAAGTAACTTGCATACTGGGGTACCCAGCCGT | |
| | | TTCTCTGGGTCAGGCTCTGGGACAGAGTTTAGTCTTACAATTTCTGGTCTGCAACCCGATG | |
| | | ACTTCGCTACCTATTACTGTCAACAATATAATAGTTATTCTCGAACATTTGGTCAGGGAAC | |
| | | AAAAGTGGAAATCAAA | |
| | VL2 | GACATACAACTCACACAAAGTCCAAGCTCTCTTTCCCTTAGTCCAGGAGAACGCGTAACTC | 565 |
| | | TCTCATGTAAAGCCTCCCAGGATATCAATAACTATCTCTCTTGGTACCAACAAAAGCCTGA | |
| | | CCAAGCTCCTAAGCTGCTTATCAAACGCGCCAATCGGTTGGTAGACGGAGTTCCCGACAGG | |
| | | TTCAGTGGGTCAGGCTCAGGTACAGATTTTACCTTGAAGATATCACGCGTGGAAGCCGAAG | |
| | | ACGTAGGGGTATATTATTGTCTGAAATATGACGAGTTCCCCTATACTTTTGGGTGTGGAAC | |
| | | TCGCCTGGAAATAAAA | |
| EPB07 | VH1 | GAGGTCCAGCTGGTTGAGTCTGGAGGTGGTGTAGTCAGGCCAGGAGGTTCCCTGCGTCTGT | 556 |
| | | CTTGCGCTGCCTCTGGGTTCACTGTGTCTGACTACAGTATGAACTGGGTTAGACAGGCTCC | |
| | | AGGGAAAGGTTTGGAATGGATAGGGTTTATTCGCAATAAACCCAATGCCTATACCACCGAA | |
| | | TACAGCGCAAGCGTTAAAGGCAGGTTCACCATCAGTAGGGACGACTCTAAGAATACCCTCT | |
| | | ACCTGCAGATGAATAGCTTGAAGACAGAGGATACCGCTGTTTATTACTGCACTACCTACCC | |
| | | CAGGTATCATGCTATGGACAGTTGGGGTCAAGGAACTATGGTCACCGTCTCCTCT | |
| | VH2 | GAGGTGCAACTGCTTGAGTCAGGAGGAGGACTGGTTCAAACCGGGGGGAGCCTTCGACTCT | 560 |
| | | CATGTGCAGCCTCTGGGTTTACATTTAGTCGTTACCAAATGATGTGGGTACGCCAGGCCCC | |
| | | CGGAAAATGTTTGGAGTGGGTGAGCAGCATTTCTCCTTCAGGAGGAGTGACACTTTACGCA | |
| | | GACAGTGTTAAGGGTCGGTTCACAATCAGTCGTGATAATTCCAAGAACACTCTCTATCTCC | |
| | | AAATGAACTCCCTTCGAGCTGAGGACACTGCTGTTTATTACTGTACTCGGGAACTTCTCGG | |
| | | CACTGTGGTTGTTCCTGTGGCTTGGAAGATGCGTGGATACTTCGACTATTGGGGGCAACTC | |
| | | ACTTCTTGTTACCGTCTCAAGC: | |
| | VL1 | GCCATACAGCTGACTCAATCACCTTCTTCTTTGAGCGCCTCTGTCGGTGATCGCGTTACAA | 577 |
| | | TTACATGCCGAGCTTCTCAGTCTATCTCTAATAACCTCCACTGGTATCTCCAGAAACCTGG | |
| | | ACAGTCACCACAGCTTCTGATATATTACGGCTTTCAGTCTATAAGTGGAGTCCCAAGTAGA | |
| | | TTTTCCGGTAGTGGATCTGGCACCGATTTTACTCTTACTATCTCTAGCCTCCAACCTGAAG | |
| | | ATTTCGCAACCTATTACTGCCAGCAGGCCAATTCCTGGCCCTTGACCTTCGGAGGTGGGAC | |
| | | TAAGCTGGAAATCAAA | |
| | VL2 | GACATACAGATGACTCAGAGCCCTGGTACACTGAGTGTATCTCCTGGGGAACGCGCCACTC | 561 |
| | | TGTCTTGCCGAGCCTCTCAAAGCGTTAGTTCCAACCTGGCTTGGTATCAGCAAAAACCCGG | |
| | | TCAAGCACCTCGCTTGCTTATCTACGGGGCCTCCACACGGGCAACCGGCATTCCTGCACGC | |
| | | TTTAGTGGCTCTGGTAGCGGGACTGAATTCACTTTGACTATATCTTCCATGCAGAGTGAGG | |
| | | ATTTCGCCGTTTATTATTGTCAACAGTACAATAACTGGCCTCCACTCACTTTTGGTTGTGG | |
| | | CACCAAAGTGGAGATAAAG | |
| EPB08 | VH1 | CAAGTGCAACTCCTTGAAAGTGGAGGTGGCCTTGTCCAGCCAGGCGGTTCACTGCGTTTGA | 558 |
| | | GCTGTGCCGCATCCGGCTTTACCTTTTCCAGTTACACAATGAGTTGGGTCCGTCAAGCACC | |
| | | CGGGCAAGCTTTGGAATGGATGGGAACTATTTCATCTGGTGGGACTTACACTTACTATCCC | |
| | | GATAGCGTCAAGGGACGTTTTACCATAAGCCGGGACAACGCTAAAAATTCACTCTATCTTC | |
| | | AGATGAACAGTCTTAGGGCTGAGGATACCGCTGTTTATTATTGCGCCCGAGAAGCCATTTT | |
| | | CACCTACTGGGGGCGCGGTACACTTGTCACCGTTAGCAGT | |
| | VH2 | GAGGTGCAACTGCTTGAGTCAGGAGGAGGACTGGTTCAAACCGGCGGGAGCCTTCGACTCT | 560 |
| | | CATGTGCAGCCTCTGGGTTTACATTTAGTCGTTACCAAATGATGTGGGTACGCCAGGCCCC | |
| | | CGGAAAATGTTTGGAGTGGGTGAGCAGCATTTCTCCTTCAGGAGGAGTGACACTTTACGCA | |
| | | GACAGTGTTAAGGGTCGGTTCACAATCAGTCGTGATAATTCCAAGAACACTCTCTATCTCC | |
| | | AAATGAACTCCCTTCGAGCTGAGGACACTGCTGTTTATTACTGTACTCGGGAACTTCTCGG | |
| | | CACTGTGGTTGTTCCTGTGGCTTGGAAGATGCGTGGATACTTCGACTATTGGGGGCAACTC | |
| | | ACTCTTGTTACCGTCTCAAGC | |
| | VL1 | GACATACAACTCACACAAAGTCCAAGCTCTCTTTCCCTTAGTCCAGGAGAACGCGTAACTC | 559 |
| | | TCTCATGTAAAGCCTCCCAGGATATCAATAACTATCTCTCTTGGTACCAACAAAAGCCTGA | |
| | | CCAAGCTCCTAAGCTGCTTATCAAACGCGCCAATCGGTTGGTAGACGGAGTTCCCGACAGG | |
| | | TTCAGTGGGTCAGGCTCAGGTACAGATTTTACCTTGAAGATATCACGCGTGGAAGCCGAAG | |
| | | ACGTAGGGGTATATTATTGTCTGAAATATGACGAGTTCCCCTATACTTTTGGGCAAGGAAC | |
| | | TCGCCTGGAAATAAAA | |
| | VL2 | GACATACAGATGACTCAGAGCCCTGGTACACTGAGTGTATCTCCTGGGGAACGCGCCACTC | 561 |
| | | TGTCTTGCCGAGCCTCTCAAAGCGTTAGTTCCAACCTGGCTTGGTATCAGCAAAAACCCGG | |
| | | TCAAGCACCTCGCTTGCTTATCTACGGGGCCTCCACACGGGCAACCGGCATTCCTGCACGC | |
| | | TTTAGTGGCTCTGGTAGCGGGACTGAATTCACTTTGACTATATCTTCCATGCAGAGTGAGG | |
| | | ATTTCGCCGTTTATTATTGTCAACAGTACAATAACTGGCCTCCACTCACTTTTGGTTGTGG | |
| | | CACCAAAGTGGAGATAAAG | |
| EPB09 | VH1 | GAGGTGCAACTGCTTGAGTCAGGAGGAGGACTGGTTCAACCCGGCGGGAGCCTTCGACTCT | 552 |
| | | CATGTGCAGCCTCTGGGTTTACATTTAGTCGTTACCAAATGATGTGGGTACGCCÄGGCCCC | |
| | | CGGAAAAGGTTTGGAGTGGGTGAGCAGCATTTCTCCTTCAGGAGGAGTGACACTTTACGCA | |
| | | GACAGTGTTAAGGGTCGGTTCACAATCAGTCGTGATAATTCCAAGAACACTCTCTATCTCC | |
| | | AAATGAACTCCCTTCGAGCTGAGGACACTGCTGTTTATTACTGTACTCGGGAACTTCTCGG | |
| | | CACTGTGGTTGTTCCTGTGGCTTGGAAGATGCGTGGATACTTCGACTATTGGGGGCAACTC | |
| | | ACTCTTGTTACCGTCTCAAGC | |
| | VH2 | GAGGTCCAGCTGGTTGAGTCTGGAGGTGGTGTAGTCAGGCCAGGAGGTTCCCTGCGTCTGT | 562 |
| | | CTTGCGCTGCCTCTGGGTTCACTGTGTCTGACTACAGTATGAACTGGGTTAGACAGGCTCC | |
| | | AGGGAAATGTTTGGAATGGATAGGGTTTATTCGCAATAAAGCCAATGCCTATACCACCGAA | |
| | | TACAGCGCAAGCGTTAAAGGCAGGTTCACCATCAGTAGGGACGACTCTAAGAATACCCTCT | |
| | | ACCTGCAGATGAATAGCTTGAAGACAGAGGATACCGCTGTTTATTACTGCACTACCTACCC | |
| | | CAGGTATCATGCTATGGACAGTTGGGGTCAAGGAACTATGGTCACCGTCTCCTCT | |
| | VL1 | GACATACAGATGACTCAGAGCCCTGGTACACTGAGTGTATCTCCTGGGGAACGCGCCACTC | 554 |
| | | TGTCTTGCCGAGCCTCTCAAAGCGTTAGTTCCAACCTGGCTTGGTATCAGCAAAAACCCGG | |
| | | TCAAGCACCTCGCTTGCTTATCTACGGGGCCTCCACACGGGCAACCGGCATTCCTGCACGC | |
| | | TTTAGTGGCTCTGGTAGCGGGACTGAATTCACTTTGACTATATCTTCCATGCAGAGTGAGG | |
| | | ATTTCGCCGTTTATTATTGTCAACAGTACAATAACTGGCCTCCACTCACTTTTGGTGGTGG | |
| | | CACCAAAGTGGAGATAAAG | |
| | VL2 | GCCATACAGCTGACTCAATCACCTTCTTCTTTGAGCGCCTCTGTCGGTGATCGCGTTACAA | 563 |
| | | TTACATGCCGAGCTTCTCAGTCTATCTCTAATAACCTCCACTGGTATCTCCAGAAACCTGG | |
| | | ACAGTCACCACAGCTTCTGATATATTACGGCTTTCAGTCTATAAGTGGAGTCCCAAGTAGA | |
| | | TTTTCCGGTAGTGGATCTGGCACCGATTTTACTCTTACTATCTCTAGCCTCCAACCTGAAG | |
| | | ATTTCGCAACCTATTACTGCCAGCAGGCCAATTCCTGGCCCTTGACCTTCGGATGTGGGAC | |
| | | TAAGCTGGAAATCAAA | |
| EPB10 | VH1 | CAAGTGCAACTCCTTGAAAGTGGAGGTGGCCTTGTCCAGCCAGGCGGTTCACTGCGTTTGA | 558 |
| | | GCTGTGCCGCATCCGGCTTTACCTTTTCCAGTTACACAATGAGTTGGGTCCGTCAAGCACC | |
| | | CGGGCAAGCTTTGGAATGGATGGGAACTATTTCATCTGGGGGACTTACACTTACTATCCC | |
| | | GATAGCGTCAAGGGACGTTTTACCATAAGCCGGGACAACGCTAAAAATTCACTCTATCTTC | |
| | | AGATGAACAGTCTTAGGGCTGAGGATACCGCTGTTTATTATTGCGCCCGAGAAGCCATTTT | |
| | | CACCTACTGGGGGCGCGGTACACTTGTCACCGTTAGCAGT | |
| | VH2 | GAGGTCCAGCTGGTTGAGTCTGGAGGTGGTGTAGTCAGGCCAGGAGGTTCCCTGCGTCTGT | 562 |
| | | CTTGCGCTGCCTCTGGGTTCACTGTGTCTGACTACAGTATGAACTGGGTTAGACAGGCTCC | |
| | | AGGGAAATGTTTGGAATGGATAGGGTTTATTCGCAATAAAGCCAATGCCTATACCACCGAA | |
| | | TACAGCGCAAGCGTTAAAGGCAGGTTCACCATCAGTAGGGACGACTCTAAGAATACCCTCT | |
| | | ACCTGCAGATGAATAGCTTGAAGACAGAGGATACCGCTGTTTATTACTGCACTACCTACCC | |
| | | CAGGTATCATGCTATGGACAGTTGGCGTCAAGGAACTATGGTCACCGTCTCCTCT | |
| | VL1 | GACATACAACTCACACAAAGTCCAAGCTCTCTTTCCCTTAGTCCAGGAGAACGCGTAACTC | 550 |
| | | TCTCATGTAAAGCCTCCCAGGATATCAATAACTATCTCTCTTGGTACCAACAAAAGCCTGA | |
| | | CCAAGCTCCTAAGCTGCTTATCAAACGCGCCAATCGGTTGGTAGACGGAGTTCCCGACAGG | |
| | | TTCAGTGGGTCAGGCTCAGGTACAGATTTTACCTTGAAGATATCACGCGTGGAAGCCGAAG | |
| | | ACGTAGGGGTATATTATTGTCTGAAATATGACGAGTTCCCCTATACTTTTGGGCAAGGAAC | |
| | | TCGCCTGGAAATAAAA | |
| | VL2 | GCCATACAGCTGACTCAATCACCTTCTTCTTTGAGCGCCTCTGTCGGTGATCGCGTTACAA | 563 |
| | | TTACATGCCGAGCTTCTCAGTCTATCTCTAATAACCTCCACTGGTATCTCCAGAAACCTGG | |
| | | ACAGTCACCACAGCTTCTGATATATTACGGCTTTCAGTCTATAAGTGGAGTCCCAAGTAGA | |
| | | TTTTCCGGTAGTGGATCTGGCACCGATTTTACTCTTACTATCTCTAGCCTCCAACCTGAAG | |
| | | ATTTCGCAACCTATTACTGCCAGCAGGCCAATTCCTGGCCCTTGACCTTCGGATGTGGGAC | |
| | | TAAGCTGGAÀATCAAA | |
| EPB11 | VH1 | GAGGTGCAACTGCTTGAGTCAGGAGGAGGACTGGTTCAACCCGGCGGGAGCCTTCGACTCT | 552 |
| | | CATGTGCAGCCTCTGGGTTTACATTTAGTCGTTACCAAATGATGTGGGTACGCCAGGCCCC | |
| | | CGGAAAAGGTTTGGAGTGGGTGAGCAGCATTTCTCCTTCAGGAGGAGTGACACTTTACGCA | |
| | | GACAGTGTTAAGGGTCGGTTCACAATCAGTCGTGATAATTCCAAGAACACTCTCTATCTCC | |
| | | AAATGAACTCCCTTCGAGCTGAGGACACTGCTGTTTATTACTGTACTCGGGAACTTCTCGG | |
| | | CACTGTGGTTGTTCCTGTGGCTTGGAAGATGCGTGGATACTTCGACTATTGGGGGCAACTC | |
| | | ACTCTTGTTACCGTCTCAAGC | |
| | VH2 | CAAGTGCAACTCCTTGAAAGTGGAGGTGGCCTTGTCCAGCCAGGCGGTTCACTGCGTTTGA | 564 |
| | | GCTGTGCCGCATCCGGCTTTACCTTTTCCAGTTACACAATGAGTTGGGTCCGTCAAGCACC | |
| | | CGGGCAATGTTTGGAATGGATGGGAACTATTTCATCTGGTGGGACTTACACTTACTATCCC | |
| | | GATAGCGTCAAGGGACGTTTTACCATAAGCCGGGACAACGCTAAAAATTCACTCTATCTTC | |
| | | AGATGAACAGTCTTAGGGCTGAGGATACCGCTGTTTATTATTGCGCCCGAGAAGCCATTTT | |
| | | CACCTACTGGGGGCGCGGTACACTTGTCACCGTTAGCAGT | |
| | VL1 | GACATACAGATGACTCAGAGCCCTGGTACACTGAGTGTATCTCCTGGGGAACGCGCCACTC | 554 |
| | | TGTCTTGCCGAGCCTCTCAAAGCGTTAGTTCCAACCTGGCTTGGTATCAGCAAAAACCCGG | |
| | | TCAAGCACCTCGCTTGCTTATCTACGGGGCCTCCACACGGGCAACCGGCATTCCTGCACGC | |
| | | TTTAGTGGCTCTGGTAGCGGGACTGAATTCACTTTGACTATATCTTCCATGCAGAGTGAGG | |
| | | ATTTCGCCGTTTATTATTGTCAACAGTACAATAACTGGCCCCACTCACTTTTGGTGGTGG | |
| | | CACCAAAGTGGAGATAAAG | |
| | VL2 | GACATACAACTCACACAAAGTCCAAGCTCTCTTTCCCTTAGTCCAGGAGAACGCGTAACTC | 565 |
| | | TCTCATGTAAAGCCTCCCAGGATATCAATAACTATCTCTCTTGGTACCAACAAAAGCCTGA | |
| | | CCAAGCTCCTAAGCTGCTTATCAAACGCGCCAATCGGTTGGTAGACGGAGTTCCCGACAGG | |
| | | TTCAGTGGGTCAGGCTCAGGTACAGATTTTACCTTGAAGATATCACGCGTGGAAGCCGAAG | |
| | | ACGTAGGGGTATATTATTGTCTGAAATATGACGAGTTCCCCTATACTTTTGGGTGTGGAAC | |
| | | TCGCCTGGAAATAAAA | |
| EPB12 | VH1 | GAGGTCCAGCTGGTTGAGTCTGGAGGTGGTGTAGTCAGGCCAGGAGGTTCCCTGCGTCTGT | 556 |
| | | CTTGCGCTGCCTCTGGGTTCACTGTGTCTGACTACAGTATGAACTGGGTTAGACAGGCTCC | |
| | | AGGGAAAGGTTTGGAATGGATAGGGTTTATTCGCAATAAAGCCAATGCCTATACCACCGAA | |
| | | TACAGCGCAAGCGTTAAAGGCAGGTTCACCATCAGTAGGGACGACTCTAAGAATACCCTCT | |
| | | ACCTGCAGATGAATAGCTTGAAGACAGAGGATACCGCTGTTTATTACTGCACTACCTACCC | |
| | | CAGGTATCATGCTATGGACAGTTGGGGTCAAGGAACTATGGTCACCGTCTCCTCT | |
| | VH2 | CAAGTGCAACTCCTTGAAAGTGGAGGTGGCCTTGTCCAGCCAGGCGGTTCACTGCGTTTGA | 564 |
| | | GCTGTGCCGCATCCGGCTTTACCTTTTCCAGTTACACAATGAGTTGGGTCCGTCAAGCACC | |
| | | CGGGCAATGTTTGGAATGGATGGGAACTATTTCATCTGGTGGGACTTACACTTACTATCCC | |
| | | GATAGCGTCAAGGGACGTTTTACCATAAGCCGGGACAACGCTAAAAATTCACTCTATCTTC | |
| | | AGATGAACAGTCTTAGGGCTGAGGATACCGCTGTTTATTATTGCGCCCGAGAAGCCATTTT | |
| | | CACCTACTGGGGGCGCGGTACACTTGTCACCGTTAGCAGT | |
| | VL1 | GCCATAGAGCTGACTCAATCACCTTCTTCTTTGAGCGCCTCTGTCGGTGATCGCGTTACAA | 557 |
| | | TTACATGCCGAGCTTCTCAGTCTATCTCTAATAACCTCCACTGGTATCTCCAGAAACCTGG | |
| | | ACAGTCACCACAGCTTCTGATATATTACGGCTTTCAGTCTATAAGTGGAGTCCCAAGTAGA | |
| | | TTTTCCGGTAGTGGATCTGGCACCGATTTTACTCTTACTATCTCTAGCCTCCAACCTGAAG | |
| | | ATTTCGCAACCTATTACTGCCAGCAGGCCAATTCCTGGCCCTTGACCTTCGGAGGTGGGAC | |
| | | TAAGCTGGAAATCAAA | |
| | VL2 | GACATACAACTCACACAAAGTCCAAGCTCTCTTTCCCTTAGTCCAGGAGAACGCGTAACTC | 565 |
| | | TCTCATGTAAAGCCTCCCAGGATATCAATAACTATCTCTCTTGGTACCAACAAAAGCCTGA | |
| | | CCAAGCTCCTAAGCTGCTTATCAAACGCGCCAATCGGTTGGTAGACGGAGTTCCCGACAGG | |
| | | TTCAGTGGGTCAGGCTCAGGTACAGATTTTACCTTGAAGATATCACGCGTGGAAGCCGAAG | |
| | | ACGTAGGGGTATATTATTGTCTGAAATATGACGAGTTCCCCTATACTTTTGGGTGTGGAAC | |
| | | TCGCCTGGAAATAAAA | |

[0376] Table 54 below shows the heavy chain and light chain CDR sequences of the engineered antibodies targeting EphA2.

TABLE 54

| Name | CDR | Sequence | SEQ ID NO |
|---|---|---|---|
| EPB01 | V1 CDR-H1 | RYQMM | 151 |
| | V1 CDR-H2 | SISPSGGVTLYADSVKG | 152 |
| | V1 CDR-H3 | ELLGTVVVPVAWKMRGYFDY | 153 |
| | V1 CDR-L1 | RASQSVSSNLA | 154 |
| | V1 CDR-L2 | GASTRAT | 155 |
| | V1 CDR-L3 | QQYNNWPPLT | 156 |
| | V2 CDR-H1 | HYMMA | 157 |
| | V2 CDR-H2 | RIGPSGGPTHYADSKG | 158 |
| | V2 CDR-H3 | YDSGYDYVAVAGPAEYFQH | 159 |
| | V2 CDR-L1 | RASQSISTWLA | 160 |
| | V2 CDR-L2 | KASNLHT | 161 |
| | V2 CDR-L3 | QQYNSYSRT | 162 |
| EPB02 | V1 CDR-H1 | DYSMN | 163 |
| | V1 CDR-H2 | FIRNKANAYTTEYSASVKG | 164 |
| | V1 CDR-H3 | YPRYHAMDSW | 165 |
| | V1 CDR-L1 | RASQSISNNLH | 166 |
| | V1 CDR-L2 | YGFQSIS | 167 |
| | V1 CDR-L3 | QQANSWPLT | 168 |
| | V2 CDR-H1 | HYMMA | 157 |
| | V2 CDR-H2 | RIGPSGGPTHYADSKG | 158 |
| | V2 CDR-H3 | YDSGYDYVAVAGPAEYFQH | 159 |
| | V2 CDR-L1 | RASQSISTWLA | 160 |
| | V2 CDR-L2 | KASNLHT | 161 |
| | V2 CDR-L3 | QQYNSYSRT | 162 |
| EPB03 | V1 CDR-H1 | SYTMS | 169 |
| | V1 CDR-H2 | TISSGGTYTYYPDSVKG | 170 |
| | V1 CDR-H3 | EAIFTYW | 171 |
| | V1 CDR-L1 | KASQDINNYLS | 172 |
| | V1 CDR-L2 | RANRLVD | 173 |
| | V1 CDR-L3 | LKYDEFPYT | 174 |
| | V2 CDR-H1 | HYMMA | 157 |
| | V2 CDR-H2 | RIGPSGGPTHYADSKG | 158 |
| | V2 CDR-H3 | YDSGYDYVAVAGPAEYFQH | 159 |
| | V2 CDR-L1 | RASQSISTWLA | 160 |
| | V2 CDR-L2 | KASNLHT | 161 |
| | V2 CDR-L3 | QQYNSYSRT | 162 |
| EPB04 | V1 CDR-H1 | HYMMA | 157 |
| | V1 CDR-H2 | RIGPSGGPTHYADSKG | 158 |
| | V1 CDR-H3 | YDSGYDYVAVAGPAEYFQH | 159 |
| | V1 CDR-L1 | RASQSISTWLA | 160 |
| | V1 CDR-L2 | KASNLHT | 161 |
| | V1 CDR-L3 | QQYNSYSRT | 162 |
| | V2 CDR-H1 | RYQMM | 151 |
| | V2 CDR-H2 | SISPSGGVTLYADSVKG | 152 |
| | V2 CDR-H3 | ELLGTYRGYFDY | 153 |
| | V2 CDR-L1 | RAS | 154 |
| | V2 CDR-L2 | GASTRAT | 155 |
| | V2 CDR-L3 | QQYNNWPPLT | 156 |
| EPB05 | V1 CDR-H1 | HYMMA | 157 |
| | V1 CDR-H2 | RIGPSGGPTHYADSKG | 158 |
| | V1 CDR-H3 | YDSGYDYVAVAGPAEYFQH | 159 |
| | V1 CDR-L1 | RASQSISTWLA | 160 |
| | V1 CDR-L2 | KASNLHT | 161 |
| | V1 CDR-L3 | QQYNSYSRT | 162 |
| | V2 CDR-H1 | DYSMN | 163 |
| | V2 CDR-H2 | FIRNKANAYTTEYSASVKG | 164 |
| | V2 CDR-H3 | YPRYHAMDSW | 165 |
| | V2 CDR-L1 | RASQSISNNLH | 166 |
| | V2 CDR-L2 | YGFQSIS | 167 |
| | V2 CDR-L3 | QQANSWPLT | 168 |
| EPB06 | V1 CDR-H1 | HYMMA | 157 |
| | V1 CDR-H2 | RIGPSGGPTHYADSKG | 158 |
| | V1 CDR-H3 | YDSGYDYVAVAGPAEYFQH | 159 |
| | V1 CDR-L1 | RASQSISTWLA | 160 |
| | V1 CDR-L2 | KASNLHT | 161 |
| | V1 CDR-L3 | QQYNSYSRT | 162 |
| | V2 CDR-H1 | SYTMS | 169 |
| | V2 CDR-H2 | TISSGGTYTYYPDSVKG | 170 |
| | V2 CDR-H3 | EAIFTYW | 171 |
| | V2 CDR-L1 | KASQDINNYLS | 172 |
| | V2 CDR-L2 | RANRLVD | 173 |
| | V2 CDR-L3 | LKYDEFPYT | 174 |
| EPB07 | V1 CDR-H1 | DYSMN | 163 |
| | V1 CDR-H2 | FIRNKANAYTTEYSASVKG | 164 |
| | V1 CDR-H3 | YPRYHAMDSW | 165 |
| | V1 CDR-L1 | RASQSISNNLH | 166 |
| | V1 CDR-L2 | YGFQSIS | 167 |
| | V1 CDR-L3 | QQANSWPLT | 168 |
| | V2 CDR-H1 | RYQMM | 151 |
| | V2 CDR-H2 | SISPSGGVTLYADSVKG | 152 |
| | V2 CDR-H3 | ELLGTYRGYFDY | 153 |
| | V2 CDR-L1 | RAS | 154 |
| | V2 CDR-L2 | GASTRAT | 155 |
| | V2 CDR-L3 | QQYNNWPPLT | 156 |
| EPB08 | V1 CDR-H1 | SYTMS | 169 |
| | V1 CDR-H2 | TISSGGTYTYYPDSVKG | 170 |
| | V1 CDR-H3 | EAIFTYW | 171 |
| | V1 CDR-L1 | KASQDINNYLS | 172 |
| | V1 CDR-L2 | RANRLVD | 173 |
| | V1 CDR-L3 | LKYDEFPYT | 174 |
| | V2 CDR-H1 | RYQMM | 151 |
| | V2 CDR-H2 | SISPSGGVTLYADSVKG | 152 |
| | V2 CDR-H3 | ELLGTYRGYFDY | 153 |
| | V2 CDR-L1 | RAS | 154 |
| | V2 CDR-L2 | GASTRAT | 155 |
| | V2 CDR-L3 | QQYNNWPPLT | 156 |
| EPB09 | V1 CDR-H1 | RYQMM | 151 |
| | V1 CDR-H2 | SISPSGGVTLYADSVKG | 152 |
| | V1 CDR-H3 | ELLGTYRGYFDY | 153 |
| | V1 CDR-L1 | RAS | 154 |
| | V1 CDR-L2 | GASTRAT | 155 |
| | V1 CDR-L3 | QQYNNWPPLT | 156 |
| | V2 CDR-H1 | DYSMN | 163 |
| | V2 CDR-H2 | FIRNKANAYTTEYSASVKG | 164 |
| | V2 CDR-H3 | YPRYHAMDSW | 165 |
| | V2 CDR-L1 | RASQSISNNLH | 166 |
| | V2 CDR-L2 | YGFQSIS | 167 |
| | V2 CDR-L3 | QQANSWPLT | 168 |
| EPB10 | V1 CDR-H1 | SYTMS | 169 |
| | V1 CDR-H2 | TISSGGTYTYYPDSVKG | 170 |
| | V1 CDR-H3 | EAIFTYW | 171 |
| | V1 CDR-L1 | KASQDINNYLS | 172 |
| | V1 CDR-L2 | RANRLVD | 173 |
| | V1 CDR-L3 | LKYDEFPYT | 174 |
| | V2 CDR-H1 | DYSMN | 163 |
| | V2 CDR-H2 | FIRNKANAYTTEYSASVKG | 164 |
| | V2 CDR-H3 | YPRYHAMDSW | 165 |
| | V2 CDR-L1 | RASQSISNNLH | 166 |
| | V2 CDR-L2 | YGFQSIS | 167 |
| | V2 CDR-L3 | QQANSWPLT | 168 |
| EPB11 | V1 CDR-H1 | RYQMM | 151 |
| | V1 CDR-H2 | SISPSGGVTLYADSVKG | 152 |
| | V1 CDR-H3 | ELLGTYRGYFDY | 153 |
| | V1 CDR-L1 | RAS | 154 |
| | V1 CDR-L2 | GASTRAT | 155 |
| | V1 CDR-L3 | QQYNNWPPLT | 156 |
| | V2 CDR-H1 | SYTMS | 169 |
| | V2 CDR-H2 | TISSGGTYTYYPDSVKG | 170 |
| | V2 CDR-H3 | EAIFTYW | 171 |
| | V2 CDR-L1 | KASQDINNYLS | 172 |
| | V2 CDR-L2 | RANRLVD | 173 |
| | V2 CDR-L3 | LKYDEFPYT | 174 |
| EPB12 | V1 CDR-H1 | DYSMN | 163 |
| | V1 CDR-H2 | FIRNKANAYTTEYSASVKG | 164 |
| | V1 CDR-H3 | YPRYHAMDSW | 165 |
| | V1 CDR-L1 | RASQSISNNLH | 166 |
| | V1 CDR-L2 | YGFQSIS | 167 |
| | V1 CDR-L3 | QQANSWPLT | 168 |
| | V2 CDR-H1 | SYTMS | 169 |
| | V2 CDR-H2 | TISSGGTYTYYPDSVKG | 170 |
| | V2 CDR-H3 | EAIFTYW | 171 |
| | V2 CDR-L1 | KASQDINNYLS | 172 |
| | V2 CDR-L2 | RANRLVD | 173 |
| | V2 CDR-L3 | LKYDEFPYT | 174 |

[0377] The EphA2 protein binding constants of EPB01, EPB02, EPB03, EPB04, EPB05, EPB06, EPB07, EPB08, EPB09, EPB10, EPB11, and EPB12 were determined using Octet Red96e (Sartorius). In order to analyze the binding constants of the twelve biparatopic antibodies, the human EphA2 recombinant protein (Sino Biologicals, 13926-H08H) was loaded onto the Anti-Penta-HIS (HIS1K) biosensor (Sartorius, 18-5120), and then the twelve antibodies were added in a binding reaction (300 seconds) and a dissociation reaction (1,200 seconds) at various concentrations. Based on the above, the affinity for EphA2 was calculated (Table 55). Table 55 below illustrates a result obtained by analyzing the binding constants of the engineered antibodies targeting EphA2.

TABLE 55

| Antibodies | K_{D} (nM) | Kₐ (1/Ms) | K_{d} (1/s) |
|---|---|---|---|
| EPB01 | 9.8579 | 2.32E+05 | 2.29E−03 |
| EPB02 | <0.001 | 2.15E+05 | <1.0E−07 |
| EPB03 | 0.7944 | 4.91E+05 | 3.90E−04 |
| EPB04 | 2.8644 | 4.95E+05 | 1.42E−03 |
| EPB05 | <0.001 | 3.42E+05 | <1.0E−07 |
| EPB06 | <0.001 | 3.84E+05 | <1.0E−07 |
| EPB07 | 0.0795 | 2.03E+05 | 1.62E−05 |
| EPB08 | 3.2174 | 6.58E+05 | 2.12E−03 |
| EPB09 | 2.3522 | 2.64E+05 | 6.20E−04 |
| EPB10 | 0.1878 | 3.92E+05 | 7.36E−05 |
| EPB11 | 0.5349 | 2.98E+05 | 1.59E−04 |
| EPB12 | 0.8657 | 5.44E+05 | 4.71E−04 |

[0378] PC-3 prostate cancer cell line was used to analyze the ability of antibodies to inhibit EphA2 signaling. PC-3 cancer cell lysate treated with each antibody at a concentration of 50 nM for 30 minutes was analyzed by western blot. The 1C1 humanized antibody that targets human EphA2 was used as a positive control and was prepared based on the sequence published in the literature (Kinch et al., US 20090304721 A1). Akt Rabbit mAb (Cell Signaling Technology, 9272), Phospho-Akt (Ser473) (D9E) XP® Rabbit mAb (Cell Signaling Technology, 4060), and β-Actin (13E5) Rabbit mAb (Cell Signaling Technology, 4970) were used as primary antibodies for analysis, and anti-rabbit IgG, HRP-linked antibody (Cell Signaling Technology, 7074) was used as secondary antibody. In the analysis of AKT signaling pathway inhibition, EPB02, EPB03, and EPB05 showed a similar level of inhibition as the positive control 1C1 (FIG. 44).

[0379] PC-3 prostate cancer cell line was used to quantify the Fc loads on the surface of EphA2 expressing cells. 100 nM antibodies were allowed to bind to the PC-3 cell line at 4° C. for 30 minutes, and the Fc loads were quantified using the Alexa 488 fluorescence-conjugated anti-human IgG Fcγ Fab antibody (Jackson ImmunoResearch, 109-547-008) (FIG. 44). It was shown that higher Fc loads on the surface of cancer cells are induced by treatment of EPB02, EPB03, EPB05, EPB06, EPB07, and EPB10 compared to treatment of 1C1 humanized antibody that targets EphA2 (FIG. 45).

### Example 19. Design, Preparation and Analysis of Antibody Structure Targeting MET

[0380] The variant light chain and heavy chain polypeptide sequences of the antibodies that specifically bind to the MET protein are shown in Table 56. For MEM01, expression vectors consisting of the sequences corresponding to Fc-Hole (SEQ ID NO: 7), MEM01 HC (SEQ ID NO: 568), and MEM01 LC (SEQ ID NO: 569) were co-transfected into EXPICHO-S™ (Gibco, A29127) (FIG. 41a, Table 56), and purification and analysis were performed in the same manner as described in Example 1. Expression, purification and analysis were performed for MEM06 in the same manner as mentioned above (Table 56, Table 57).

TABLE 56

| Name | Sequence | SEQ ID NO |
|---|---|---|
| MEM01 HC | EVQLVESGGGLVQPGGSLRLSCAASGYTFT | 568 |
| | SYWLHWVRQAPGKCLEWVGMIDPSNSDTRF | |
| | NPNFKDRFTISADTSKNTAYLQMNSLRAED | |
| | TAVYYCATYRSYVTPLDYWGQGTLVTVSSA | |
| | STKGPSVFPLAPSSKSTSGGTAALGCLVKD | |
| | YFPEPVTVSWNSGALTSGVHTFPAVLQSSG | |
| | LYSLSSVVTVPSSSLGTQTYICNVNHKPSN | |
| | TKVDKKVEPKSCDKTHTCPPCPAPELLGGP | |
| | SVFLFPPKPKDTLMISRTPEVTCVVVDVSH | |
| | EDPEVKFNWYVDGVEVHNAKTKPREEQYNS | |
| | TYRVVSVLTVLHQDWLNGKEYKCKVSNKAL | |
| | PAPIEKTISKAKGQPREPQVYTLPPCREEM | |
| | TKNQVSLWCLVKGFYPSDIAVEWESNGQPE | |
| | NNYKTTPPVLDSDGSFFLYSKLTVDKSRWQ | |
| | QGNVFSCSVMHEALHNHYTQKSLSLSPGK | |
| MEM01 LC | DIQMTQSPSSLSASVGDRVTITCKSSQSLL | 569 |
| | YTSSQKNYLAWYQQKPGKAPKLLIYWASTR | |
| | ESGVPSRFSGSGSGTDFTLTISSLQPEDFA | |
| | TYYCQQYYAYPWTFGCGTKVEIKRTVAAPS | |
| | VFIFPPSDEQLKSGTASVVCLLNNFYPREA | |
| | KVQWKVDNALQSGNSQESVTEQDSKDSTYS | |
| | LSSTLTLSKADYEKHKVYACEVTHQGLSSP | |
| | VTKSFNRGECGGGGSGGGGSGGGGSEPKSS | |
| | DKTHTCPPCPAPELLGGPSVFLFPPKPKDT | |
| | LMISRTPEVTCVVVDVSHEDPEVKFNWYVD | |
| | GVEVHNAKTKPREEQYNSTYRVVSVLTVLH | |
| | QDWLNGKEYKCKVSNKALPAPIEKTISKAK | |
| | GQPREPQVYTLPPCREEMTKNQVSLWCLVK | |
| | GFYPSDIAVEWESNGQPENNYKTTPPVLDS | |
| | DGSFFLYSKLTVDKSRWQQGNVFSCSVMHE | |
| | ALHNHYTQKSLSLSPGK | |
| MEM06 HC | QVQLVQSGAEVKKPGASVKVSCKASGYTFT | 570 |
| | SYGFSWVRQAPGQCLEWMGWISASNGNTYY | |
| | AQKLQGRVTMTTDTSTSTAYMELRSLRSDD | |
| | TAVYYCARVYADYADYWGQGTLVTVSSAST | |
| | KGPSVFPLAPSSKSTSGGTAALGCLVKDYF | |
| | PEPVTVSWNSGALTSGVHTFPAVLQSSGLY | |
| | SLSSVVTVPSSSLGTQTYICNVNHKPSNTK | |
| | VDKKVEPKSCDKTHTCPPCPAPELLGGPSV | |
| | FLFPPKPKDTLMISRTPEVTCVVVDVSHED | |
| | PEVKFNWYVDGVEVHNAKTKPREEQYNSTY | |
| | RVVSVLTVLHQDWLNGKEYKCKVSNKALPA | |
| | PIEKTISKAKGQPREPQVYTLPPCREEMTK | |
| | NQVSLWCLVKGFYPSDIAVEWESNGQPENN | |
| | YKTTPPVLDSDGSFFLYSKLTVDKSRWQQG | |
| | NVFSCSVMHEALHNHYTQKSLSLSPGK | |
| MEM06 LC | DIQMTQSPSSVSASVGDRVTITCRASQGIN | 571 |
| | TWLAWYQQKPGKAPKLLIYAASSLKSGVPS | |
| | RFSGSGSGTDFTLTISSLQPEDFATYYCQQ | |
| | ANSFPLTFGCGTKVEIKRTVAAPSVFIFPP | |
| | SDEQLKSGTASVVCLLNNFYPREAKVQWKV | |
| | DNALQSGNSQESVTEQDSKDSTYSLSSTLT | |
| | LSKADYEKHKVYACEVTHQGLSSPVTKSFN | |
| | RGECGGGGSGGGGSGGGGSEPKSSDKTHTC | |
| | PPCPAPELLGGPSVFLFPPKPKDTLMISRT | |
| | PEVTCVVVDVSHEDPEVKFNWYVDGVEVHN | |
| | AKTKPREEQYNSTYRVVSVLTVLHQDWLNG | |
| | KEYKCKVSNKALPAPIEKTISKAKGQPREP | |
| | QVYTLPPCREEMTKNQVSLWCLVKGFYPSD | |
| | IAVEWESNGQPENNYKTTPPVLDSDGSFFL | |
| | YSKLTVDKSRWQQGNVFSCSVMHEALHNHY | |
| | TQKSLSLSPGK | |

TABLE 57

| | | SEQ ID |
|---|---|---|
| Name | Sequence | NO |
| MEM01 HC | GAAGTCCAATTGGTCGAGAGTGGAGGCGGG | 572 |
| | TTGGTACAGCCAGGAGGTTCACTTAGGTTG | |
| | TCCTGCGCCGCCAGTGGTTACACTTTCACA | |
| | TCTTATTGGCTGCACTGGGTGCGCCAAGCT | |
| | CCTGGGAAGTGTCTCGAATGGGTGGGTATG | |
| | ATCGATCCATCTAATTCCGACACACGGTTT | |
| | AACCCAAATTTTAAGGATAGATTTACAATT | |
| | AGTGCTGACACTTCAAAAAACACAGCATAC | |
| | CTCCAGATGAACAGCCTGCGTGCTGAGGAT | |
| | ACTGCTGTCTACTACTGTGCAACTTACCGC | |
| | TCCTATGTCACACCTTTGGATTATTGGGGC | |
| | CAGGGGACTCTGGTGACCGTGAGTTCTGCT | |
| | AGCACCAAAGGACCTAGTGTTTTTCCTCTT | |
| | GCCCCTTCCTCAAAGTCTACCTCTGGGGGG | |
| | ACAGCCGCTCTGGGCTGCCTGGTCAAGGAT | |
| | TATTTCCCAGAGCCTGTCACTGTCAGTTGG | |
| | AACTCTGGAGCCTTGACTTCTGGTGTTCAT | |
| | ACATTTCCTGCTGTCCTTCAAAGCAGCGGC | |
| | TTGTACTCATTGTCTTCTGTTGTGACAGTA | |
| | CCCTCAAGCAGCCTCGGCACTCAGACATAC | |
| | ATCTGCAATGTCAACCACAAACCCTCAAAT | |
| | ACAAAGGTAGATAAAAAAGTCGAACCAAAG | |
| | TCTTGTGACAAAACTCACACGTGCCCACCG | |
| | TGCCCAGCACCTGAACTCCTGGGGGGACCG | |
| | TCAGTCTTCCTCTTCCCCCCAAAACCCAAG | |
| | GACACCCTCATGATCTCCCGGACCCCTGAG | |
| | GTCACATGCGTGGTGGTGGACGTGAGCCAC | |
| | GAAGACCCTGAGGTCAAGTTCAACTGGTAC | |
| | GTGGACGGCGTGGAGGTGCATAATGCCAAG | |
| | ACAAAGCCGCGGGAGGAGCAGTACAACAGC | |
| | ACGTACCGTGTGGTCAGCGTCCTCACCGTC | |
| | CTGCACCAGGACTGGCTGAATGGCAAGGAG | |
| | TACAAGTGCAAGGTCTCCAACAAAGCCCTC | |
| | CCAGCCCCCATCGAGAAAACCATCTCCAAA | |
| | GCCAAAGGGCAGCCCCGAGAACCACAGGTG | |
| | TACACCCTGCCCCCATGCCGGGAGGAGATG | |
| | ACCAAGAACCAGGTCAGCCTGTGGTGCCTG | |
| | GTCAAAGGCTTCTATCCCAGCGACATCGCC | |
| | GTGGAGTGGGAGAGCAATGGGCAGCCGGAG | |
| | AACAACTACAAGACCACGCCTCCCGTGCTG | |
| | GACTCCGACGGCTCCTTCTTCCTCTACAGC | |
| | AAGCTCACCGTGGACAAGAGCAGGTGGCAG | |
| | CAGGGGAACGTCTTCTCATGCTCCGTGATG | |
| | CATGAGGCTCTGCACAACCACTACACGCAG | |
| | AAGAGCCTCTCCCTGTCTCCGGGTAAA | |
| MEM01 LC | GATATACAGATGACACAAAGTCCCTCATCA | 573 |
| | CTTTCTGCCTCCGTTGGAGATCGTGTGACC | |
| | ATTACCTGTAAGAGTTCCCAATCACTGCTT | |
| | TATACCTCTTCACAAAAAAATTACCTCGCT | |
| | TGGTACCAGCAGAAGCCAGGTAAAGCACCT | |
| | AAGCTGTTGATCTATTGGGCCTCCACTAGA | |
| | GAGTCAGGCGTGCCCAGCCGTTTCTCCGGT | |
| | TCAGGGAGTGGGACAGACTTTACCTTGACC | |
| | ATTTCTTCTTTGCAACCTGAAGACTTCGCC | |
| | ACATACTATTGTCAGCAATATTACGCATAT | |
| | CCATGGACCTTTGGGTGTGGAACCAAAGTC | |
| | GAAATAAAACGTACGGTGGCAGCTCCCAGC | |
| | GTTTTTATCTTTCCCCCATCCGACGAGCAG | |
| | CTCAAGAGTGGCACTGCCTCTGTAGTTTGT | |
| | TTGCTGAATAACTTCTATCCACGTGAAGCA | |
| | AAAGTACAGTGGAAGGTCGATAATGCCCTT | |
| | CAGAGCGGTAACAGCCAAGAAAGTGTTACC | |
| | GAGCAAGATTCCAAAGATTCCACTTACAGT | |
| | CTGTCCAGCACATTGACACTGAGTAAGGCT | |
| | GATTACGAAAAACACAAGGTGTACGCATGC | |
| | GAGGTGACACACCAAGGTCTTTCATCTCCT | |
| | GTAACTAAGAGCTTTAACCGGGGAGAATGT | |
| | GGTGGTGGGGGCAGCGGGGGCGGAGGTAGT | |
| | GGAGGCGGCGGTAGTGAACCAAAGAGTAGT | |
| | GACAAAACTCACACGTGCCCACCGTGCCCA | |
| | GCACCTGAACTCCTGGGGGGACCGTCAGTC | |
| | TTCCTCTTCCCCCCAAAACCCAAGGACACC | |
| | CTCATGATCTCCCGGACCCCTGAGGTCACA | |
| | TGCGTGGTGGTGGACGTGAGCCACGAAGAC | |
| | CCTGAGGTCAAGTTCAACTGGTACGTGGAC | |
| | GGCGTGGAGGTGCATAATGCCAAGACAAAG | |
| | CCGCGGGAGGAGCAGTACAACAGCACGTAC | |
| | CGTGTGGTCAGCGTCCTCACCGTCCTGCAC | |
| | CAGGACTGGCTGAATGGCAAGGAGTACAAG | |
| | TGCAAGGTCTCCAACAAAGCCCTCCCAGCC | |
| | CCCATCGAGAAAACCATCTCCAAAGCCAAA | |
| | GGGCAGCCCCGAGAACCACAGGTGTACACC | |
| | CTGCCCCCATGCCGGGAGGAGATGACCAAG | |
| | AACCAGGTCAGCCTGTGGTGCCTGGTCAAA | |
| | GGCTTCTATCCCAGCGACATCGCCGTGGAG | |
| | TGGGAGAGCAATGGGCAGCCGGAGAACAAC | |
| | TACAAGACCACGCCTCCCGTGCTGGACTCC | |
| | GACGGCTCCTTCTTCCTCTACAGCAAGCTC | |
| | ACCGTGGACAAGAGCAGGTGGCAGCAGGGG | |
| | AACGTCTTCTCATGCTCCGTGATGCATGAG | |
| | GCTCTGCACAACCACTACACGCAGAAGAGC | |
| | CTCTCCCTGTCTCCGGGTAAA | |
| MEM06 HC | CAAGTGCAGCTTGTTCAATCAGGGGCCGAG | 574 |
| | GTTAAGAAACCAGGTGCTTCCGTCAAGGTC | |
| | TCCTGCAAGGCTTCCGGCTACACTTTTACC | |
| | AGTTATGGGTTCAGTTGGGTTAGACAGGCC | |
| | CCAGGGCAGTGTCTCGAATGGATGGGATGG | |
| | ATTTCCGCATCTAACGGGAATACTTACTAT | |
| | GCCCAGAAACTTCAAGGTAGGGTTACCATG | |
| | ACTACCGATACTTCCACTAGTACAGCCTAC | |
| | ATGGAACTCAGATCACTCCGTTCAGATGAC | |
| | ACCGCAGTATATTACTGTGCAAGGGTATAT | |
| | GCTGATTATGCCGATTATTGGGGGCAAGGA | |
| | ACACTTGTCACAGTATCCAGCGCTAGCACC | |
| | AAAGGACCTAGTGTTTTTCCTCTTGCCCCT | |
| | TCCTCAAAGTCTACCTCTGGGGGGACAGCC | |
| | GCTCTGGGCTGCCTGGTCAAGGATTATTTC | |
| | CCAGAGCCTGTCACTGTCAGTTGGAACTCT | |
| | GGAGCCTTGACTTCTGGTGTTCATACATTT | |
| | CCTGCTGTCCTTCAAAGCAGCGGCTTGTAC | |
| | TCATTGTCTTCTGTTGTGACAGTACCCTCA | |
| | AGCAGCCTCGGCACTCAGACATACATCTGC | |
| | AATGTCAACCACAAACCCTCAAATACAAAG | |
| | GTAGATAAAAAAGTCGAACCAAAGTCTTGT | |
| | GACAAAACTCACACGTGCCCACCGTGCCCA | |
| | GCACCTGAACTCCTGGGGGGACCGTCAGTC | |
| | TTCCTCTTCCCCCCAAAACCCAAGGACACC | |
| | CTCATGATCTCCCGGACCCCTGAGGTCACA | |
| | TGCGTGGTGGTGGACGTGAGCCACGAAGAC | |
| | CCTGAGGTCAAGTTCAACTGGTACGTGGAC | |
| | GGCGTGGAGGTGCATAATGCCAAGACAAAG | |
| | CCGCGGGAGGAGCAGTACAACAGCACGTAC | |
| | CGTGTGGTCAGCGTCCTCACCGTCCTGCAC | |
| | CAGGACTGGCTGAATGGCAAGGAGTACAAG | |
| | TGCAAGGTCTCCAACAAAGCCCTCCCAGCC | |
| | CCCATCGAGAAAACCATCTCCAAAGCCAAA | |
| | GGGCAGCCCCGAGAACCACAGGTGTACACC | |
| | CTGCCCCCATGCCGGGAGGAGATGACCAAG | |
| | AACCAGGTCAGCCTGTGGTGCCTGGTCAAA | |
| | GGCTTCTATCCCAGCGACATCGCCGTGGAG | |
| | TGGGAGAGCAATGGGCAGCCGGAGAACAAC | |
| | TACAAGACCACGCCTCCCGTGCTGGACTCC | |
| | GACGGCTCCTTCTTCCTCTACAGCAAGCTC | |
| | ACCGTGGACAAGAGCAGGTGGCAGCAGGGG | |
| | AACGTCTTCTCATGCTCCGTGATGCATGAG | |
| | GCTCTGCACAACCACTACACGCAGAAGAGC | |
| | CTCTCCCTGTCTCCGGGTAAA | |
| MEM06 LC | GATATCCAAATGACACAGTCACCCTCAAGT | 575 |
| | GTTAGCGCAAGTGTCGGGGACAGGGTGACC | |
| | ATCACATGCAGAGCTTCCCAGGGTATCAAT | |
| | ACATGGCTGGCATGGTATCAACAGAAACCC | |
| | GGAAAAGCACCAAAATTGCTTATTTATGCA | |
| | GCTTCTAGCTTGAAGAGTGGGGTTCCCTCT | |
| | CGTTTCTCTGGTTCAGGAAGCGGTACTGAC | |
| | TTTACCTTGACCATCAGTAGCTTGCAGCCC | |
| | GAAGATTTCGCTACATATTATTGCCAACAG | |
| | GCCAACTCTTTTCCCCTGACATTCGGTTGT | |
| | GGCACTAAAGTGGAAATTAAGCGTACGGTG | |
| | GCAGCTCCCAGCGTTTTTATCTTTCCCCCA | |
| | TCCGACGAGCAGCTCAAGAGTGGCACTGCC | |
| | TCTGTAGTTTGTTTGCTGAATAACTTCTAT | |
| | CCACGTGAAGCAAAAGTACAGTGGAAGGTC | |
| | GATAATGCCCTTCAGAGCGGTAACAGCCAA | |
| | GAAAGTGTTACCGAGCAAGATTCCAAAGAT | |
| | TCCACTTACAGTCTGTCCAGCACATTGACA | |
| | CTGAGTAAGGCTGATTACGAAAAACACAAG | |
| | GTGTACGCATGCGAGGTGACACACCAAGGT | |
| | CTTTCATCTCCTGTAACTAAGAGCTTTAAC | |
| | CGGGGAGAATGTGGTGGTGGGGGCAGCGGG | |
| | GGCGGAGGTAGTGGAGGCGGCGGTAGTGAA | |
| | CCAAAGAGTAGTGACAAAACTCACACGTGC | |
| | CCACCGTGCCCAGCACCTGAACTCCTGGGG | |
| | GGACCGTCAGTCTTCCTCTTCCCCCCAAAA | |
| | CCCAAGGACACCCTCATGATCTCCCGGACC | |
| | CCTGAGGTCACATGCGTGGTGGTGGACGTG | |
| | AGCCACGAAGACCCTGAGGTCAAGTTCAAC | |
| | TGGTACGTGGACGGCGTGGAGGTGCATAAT | |
| | GCCAAGACAAAGCCGCGGGAGGAGCAGTAC | |
| | AACAGCACGTACCGTGTGGTCAGCGTCCTC | |
| | ACCGTCCTGCACCAGGACTGGCTGAATGGC | |
| | AAGGAGTACAAGTGCAAGGTCTCCAACAAA | |
| | GCCCTCCCAGCCCCCATCGAGAAAACCATC | |
| | TCCAAAGCCAAAGGGCAGCCCCGAGAACCA | |
| | CAGGTGTACACCCTGCCCCCATGCCGGGAG | |
| | GAGATGACCAAGAACCAGGTCAGCCTGTGG | |
| | TGCCTGGTCAAAGGCTTCTATCCCAGCGAC | |
| | ATCGCCGTGGAGTGGGAGAGCAATGGGCAG | |
| | CCGGAGAACAACTACAAGACCACGCCTCCC | |
| | GTGCTGGACTCCGACGGCTCCTTCTTCCTC | |
| | TACAGCAAGCTCACCGTGGACAAGAGCAGG | |
| | TGGCAGCAGGGGAACGTCTTCTCATGCTCC | |
| | GTGATGCATGAGGCTCTGCACAACCACTAC | |
| | ACGCAGAAGAGCCTCTCCCTGTCTCCGGGT | |
| | AAA | |

[0381] Table 58 below shows the polypeptide sequences of the heavy chain variable region (VH) and light chain variable region (VL) of the engineered antibodies targeting MET. Table 59 below shows the nucleotide sequences of the heavy chain variable region (VH) and light chain variable region (VL) of the engineered antibodies targeting MET.

TABLE 58

| Name | | Sequence | SEQ ID NO |
|---|---|---|---|
| MEM01 | VH | EVQLVESGGGLVQPGGSLRLSCAASGYTFT | 576 |
| | | SYWLHWVRQAPGKCLEWVGMIDPSNSDTRF | |
| | | NPNFKDRFTISADTSKNTAYLQMNSLRAED | |
| | | TAVYYCATYRSYVTPLDYWGQGTLVTVSS | |
| | VL | DIQMTQSPSSLSASVGDRVTITCKSSQSLL | 577 |
| | | YTSSQKNYLAWYQQKPGKAPKLLIYWASTR | |
| | | ESGVPSRFSGSGSGTDFTLTISSLQPEDFA | |
| | | TYYCQQYYAYPWTFGCGTKVEIK | |
| MEM06 | VH | QVQLVQSGAEVKKPGASVKVSCKASGYTFT | 578 |
| | | SYGFSWVRQAPGQCLEWMGWISASNGNTYY | |
| | | AQKLQGRVTMTTDTSTSTAYMELRSLRSDD | |
| | | TAVYYCARVYADYADYWGQGTLVTVSS | |
| | VL | DIQMTQSPSSVSASVGDRVTITCRASQGIN | 579 |
| | | TWLAWYQQKPGKAPKLLIYAASSLKSGVPS | |
| | | RFSGSGSGTDFTLTISSLQPEDFATYYCQQ | |
| | | ANSFPLTFGCGTKVEIK | |

TABLE 59

| Name | | Sequence | SEQ ID NO |
|---|---|---|---|
| MEM01 | VH | GAAGTCCAATTGGTCGAGAGTGGAGGCGGG | 580 |
| | | TTGGTACAGCCAGGAGGTTCACTTAGGTTG | |
| | | TCCTGCGCCGCCAGTGGTTACACTTTCACA | |
| | | TCTTATTGGCTGCACTGGGTGCGCCAAGCT | |
| | | CCTGGGAAGTGTCTCGAATGGGTGGGTATG | |
| | | ATCGATCCATCTAATTCCGACACACGGTTT | |
| | | AACCCAAATTTTAAGGATAGATTTACAATT | |
| | | AGTGCTGACACTTCAAAAAACACAGCATAC | |
| | | CTCCAGATGAACAGCCTGCGTGCTGAGGAT | |
| | | ACTGCTGTCTACTACTGTGCAACTTACCGC | |
| | | TCCTATGTCACACCTTTGGATTATTGGGGC | |
| | | CAGGGGACTCTGGTGACCGTGAGTTCT | |
| | VL | GATATACAGATGACACAAAGTCCCTCATCA | 581 |
| | | CTTTCTGCCTCCGTTGGAGATCGTGTGACC | |
| | | ATTACCTGTAAGAGTTCCCAATCACTGCTT | |
| | | TATACCTCTTCACAAAAAAATTACCTCGCT | |
| | | TGGTACCAGCAGAAGCCAGGTAAAGCACCT | |
| | | AAGCTGTTGATCTATTGGGCCTCCACTAGA | |
| | | GAGTCAGGCGTGCCCAGCCGTTTCTCCGGT | |
| | | TCAGGGAGTGGGACAGACTTTACCTTGACC | |
| | | ATTTCTTCTTTGCAACCTGAAGACTTCGCC | |
| | | ACATACTATTGTCAGCAATATTACGCATAT | |
| | | CCATGGACCTTTGGGTGTGGAACCAAAGTC | |
| | | GAAATAAAA | |
| MEM06 | VH | CAAGTGCAGCTTGTTCAATCAGGGGCCGAG | 582 |
| | | GTTAAGAAACCAGGTGCTTCCGTCAAGGTC | |
| | | TCCTGCAAGGCTTCCGGCTACACTTTTACC | |
| | | AGTTATGGGTTCAGTTGGGTTAGACAGGCC | |
| | | CCAGGGCAGTGTCTCGAATGGATGGGATGG | |
| | | ATTTCCGCATCTAACGGGAATACTTACTAT | |
| | | GCCCAGAAACTTCAAGGTAGGGTTACCATG | |
| | | ACTACCGATACTTCCACTAGTACAGCCTAC | |
| | | ATGGAACTCAGATCACTCCGTTCAGATGAC | |
| | | ACCGCAGTATATTACTGTGCAAGGGTATAT | |
| | | GCTGATTATGCCGATTATTGGGGGCAAGGA | |
| | | ACACTTGTCACAGTATCCAGC | |
| | VL | GATATCCAAATGACACAGTCACCCTCAAGT | 583 |
| | | GTTAGCGCAAGTGTCGGGGACAGGGTGACC | |
| | | ATCACATGCAGAGCTTCCCAGGGTATCAAT | |
| | | ACATGGCTGGCATGGTATCAACAGAAACCC | |
| | | GGAAAAGCACCAAAATTGCTTATTTATGCA | |
| | | GCTTCTAGCTTGAAGAGTGGGGTTCCCTCT | |
| | | CGTTTCTCTGGTTCAGGAAGCGGTACTGAC | |
| | | TTTACCTTGACCATCAGTAGCTTGCAGCCC | |
| | | GAAGATTTCGCTACATATTATTGCCAACAG | |
| | | GCCAACTCTTTTCCCCTGACATTCGGTTGT | |
| | | GGCACTAAAGTGGAAATTAAG | |

[0382] Table 60 below shows the heavy chain and light chain CDR sequences of the engineered antibodies targeting MET.

TABLE 60

| Name | CDR | Sequence | SEQ ID NO |
|---|---|---|---|
| MEM01 | CDR-H1 | SYWLH | 236 |
| | CDR-H2 | MIDPSNSDTRFNPNFKD | 237 |
| | CDR-H3 | YRSYVTPLDY | 238 |
| | CDR-L1 | KSSQSLLYTSSQKNYLA | 239 |
| | CDR-L2 | WASTRES | 240 |
| | CDR-L3 | QQYYAYPWT | 241 |
| MEM06 | CDR-H1 | SYGFS | 584 |
| | CDR-H2 | WISASNGNTYYAQKLQG | 585 |
| | CDR-H3 | VYADYADY | 586 |
| | CDR-L1 | QQANSFPLT | 587 |
| | CDR-L2 | AASSLKS | 588 |
| | CDR-L3 | QQANSFPLT | 589 |

[0383] The MET protein binding constants of MEM01 and MEM06 were determined using Octet Red96e (Sartorius). In order to analyze the binding constants of the antibodies, the antibodies were loaded onto the anti-human Fab-CH1 2nd generation (FAB2G) biosensor (Sartorius, 18-5125). Then, the human MET recombinant protein (Sino Biologicals, 10692-H08H) were added in a binding reaction (300 seconds) and a dissociation reaction (600 seconds) at various concentrations (FIG. 46), and the affinities of antibodies for MET was calculated (FIG. 46, Table 61). Table 61 below illustrates the binding constants of the engineered antibodies targeting MET.

TABLE 61

| Antibodies | K_{D} (nM) | Kₐ (1/Ms) | K_{d} (1/s) |
|---|---|---|---|
| MEM01 | 0.1861 | 3.31E+05 | 6.16E−05 |
| MEM06 | 0.7881 | 4.20E+05 | 3.31E−04 |

[0384] MKN45 and SNU-5 gastric cancer cell lines were used to quantify the Fc loads on the surface of MET expressing cells. The human IgG1 control, onartuzumab (produced in CHO cell line), emibetuzumab, MEM01I, and MEM06 antibodies were allowed to bind to the cell lines at 4° C. for 30 minutes, and the Fc loads were quantified using the Alexa 488 fluorescence-conjugated anti-human IgG Fcγ Fab antibody (Jackson ImmunoResearch, 109-547-008) (FIGS. 47 and 48). It was shown that high Fc loads on the surface of MET expressing cancer cells are induced by treatment of MEM01 compared to onartuzumab and emibetuzumab, which target MET (FIGS. 47 and 48). Treatment of MEM06 induced higher Fc loads on the surface of MET expressing cancer cells compared to emibetuzumab, but a similar level when compared to onartuzumab (FIGS. 47 and 48).

### Example 20. Design, Preparation and Analysis of Antibody Structure Targeting EGFR

[0385] The variant light chain and heavy chain polypeptide sequences of the antibodies that specifically bind to the EGFR protein are shown in Table 62. For EGM01, expression vectors consisting of the sequences corresponding to Fc-Hole (SEQ ID NO: 7), EGM01 HC (SEQ ID NO: 590), and EGF01 LC (SEQ ID NO: 591) were co-transfected into EXPICHOWS™ (Gibco, A29127) (FIG. 41a, Table 62), and purification and analysis were performed in the same manner as described in Example 1. Expression, purification and analysis were performed for EGM02, EGM03, EGM04, EGM05, and EGM06 in the same manner as mentioned above (Table 62).

TABLE 62

| | | SEQ ID |
|---|---|---|
| Name | Sequence | NO |
| EGM01 HC | QVQLKQSGPGLVQPSQSLSITCTVSGFSLT | 590 |
| | NYGVHWVRQSPGKCLEWLGVIWSGGNTDYN | |
| | TPFTSRLSINKDNSKSQVFFKMNSLQSNDT | |
| | AIYYCARALTYYDYEFAYWGQGTLVTVSAA | |
| | STKGPSVFPLAPSSKSTSGGTAALGCLVKD | |
| | YFPEPVTVSWNSGALTSGVHTFPAVLQSSG | |
| | LYSLSSVVTVPSSSLGTQTYICNVNHKPSN | |
| | TKVDKKVEPKSCDKTHTCPPCPAPELLGGP | |
| | SVFLFPPKPKDTLMISRTPEVTCVVVDVSH | |
| | EDPEVKFNWYVDGVEVHNAKTKPREEQYNS | |
| | TYRVVSVLTVLHQDWLNGKEYKCKVSNKAL | |
| | PAPIEKTISKAKGQPREPQVYTLPPCREEM | |
| | TKNQVSLWCLVKGFYPSDIAVEWESNGQPE | |
| | NNYKTTPPVLDSDGSFFLYSKLTVDKSRWQ | |
| | QGNVFSCSVMHEALHNHYTQKSLSLSPGK | |
| EGM01 LC | DILLTQSPVILSVSPGERVSFSCRASQSIG | 591 |
| | TNIHWYQQRTNGSPRLLIKYASESISGIPS | |
| | RFSGSGSGTDFTLSINSVESEDIADYYCQQ | |
| | NNNWPTTFGCGTKLELKRTVAAPSVFIFPP | |
| | SDEQLKSGTASVVCLLNNFYPREAKVQWKV | |
| | DNALQSGNSQESVTEQDSKDSTYSLSSTLT | |
| | LSKADYEKHKVYACEVTHQGLSSPVTKSFN | |
| | RGECGGGGSGGGGSGGGGSEPKSSDKTHTC | |
| | PPCPAPELLGGPSVFLFPPKPKDTLMISRT | |
| | PEVTCVVVDVSHEDPEVKFNWYVDGVEVHN | |
| | AKTKPREEQYNSTYRVVSVLTVLHQDWLNG | |
| | KEYKCKVSNKALPAPIEKTISKAKGQPREP | |
| | QVYTLPPCREEMTKNQVSLWCLVKGFYPSD | |
| | IAVEWESNGQPENNYKTTPPVLDSDGSFFL | |
| | YSKLTVDKSRWQQGNVFSCSVMHEALHNHY | |
| | TQKSLSLSPGK | |
| EGM02 HC | QVQLQESGPGLVKPSQTLSLTCTVSGGSIS | 592 |
| | SGDYYWSWIRQPPGKCLEWIGYIYYSGSTD | |
| | YNPSLKSRVTMSVDTSKNQFSLKVNSVTAA | |
| | DTAVYYCARVSIFGVGTFDYWGQGTLVTVS | |
| | SASTKGPSVFPLAPSSKSTSGGTAALGCLV | |
| | KDYFPEPVTVSWNSGALTSGVHTFPAVLQS | |
| | SGLYSLSSVVTVPSSSLGTQTYICNVNHKP | |
| | SNTKVDKKVEPKSCDKTHTCPPCPAPELLG | |
| | GPSVFLFPPKPKDTLMISRTPEVTCVVVDV | |
| | SHEDPEVKFNWYVDGVEVHNAKTKPREEQY | |
| | NSTYRVVSVLTVLHQDWLNGKEYKCKVSNK | |
| | ALPAPIEKTISKAKGQPREPQVYTLPPCRE | |
| | EMTKNQVSLWCLVKGFYPSDIAVEWESNGQ | |
| | PENNYKTTPPVLDSDGSFFLYSKLTVDKSR | |
| | WQQGNVFSCSVMHEALHNHYTQKSLSLSPG | |
| | K | |
| EGM02 LC | EIVMTQSPATLSLSPGERATLSCRASQSVS | 593 |
| | SYLAWYQQKPGQAPRLLIYDASNRATGIPA | |
| | RFSGSGSGTDFTLTISSLEPEDFAVYYCHQ | |
| | YGSTPLTFGCGTKAEIKRTVAAPSVFIFPP | |
| | SDEQLKSGTASVVCLLNNFYPREAKVQWKV | |
| | DNALQSGNSQESVTEQDSKDSTYSLSSTLT | |
| | LSKADYEKHKVYACEVTHQGLSSPVTKSFN | |
| | RGECGGGGSGGGGSGGGGSEPKSSDKTHTC | |
| | PPCPAPELLGGPSVFLFPPKPKDTLMISRT | |
| | PEVTCVVVDVSHEDPEVKFNWYVDGVEVHN | |
| | AKTKPREEQYNSTYRVVSVLTVLHQDWLNG | |
| | KEYKCKVSNKALPAPIEKTISKAKGQPREP | |
| | QVYTLPPCREEMTKNQVSLWCLVKGFYPSD | |
| | IAVEWESNGQPENNYKTTPPVLDSDGSFFL | |
| | YSKLTVDKSRWQQGNVFSCSVMHEALHNHY | |
| | TQKSLSLSPGK | |
| EGM03 HC | QVQLQESGPGLVKPSETLSLTCTVSGGSVS | 594 |
| | SGDYYWTWIRQSPGKCLEWIGHIYYSGNTN | |
| | YNPSLKSRLTISIDTSKTQFSLKLSSVTAA | |
| | DTAIYYCVRDRVTGAFDIWGQGTMVTVSSA | |
| | STKGPSVFPLAPSSKSTSGGTAALGCLVKD | |
| | YFPEPVTVSWNSGALTSGVHTFPAVLQSSG | |
| | LYSLSSVVTVPSSSLGTQTYICNVNHKPSN | |
| | TKVDKKVEPKSCDKTHTCPPCPAPELLGGP | |
| | SVFLFPPKPKDTLMISRTPEVTCVVVDVSH | |
| | EDPEVKFNWYVDGVEVHNAKTKPREEQYNS | |
| | TYRVVSVLTVLHQDWLNGKEYKCKVSNKAL | |
| | PAPIEKTISKAKGQPREPQVYTLPPCREEM | |
| | TKNQVSLWCLVKGFYPSDIAVEWESNGQPE | |
| | NNYKTTPPVLDSDGSFFLYSKLTVDKSRWQ | |
| | QGNVFSCSVMHEALHNHYTQKSLSLSPGK | |
| EGM03 LC | DIQMTQSPSSLSASVGDRVTITCQASQDIS | 595 |
| | NYLNWYQQKPGKAPKLLIYDASNLETGVPS | |
| | RFSGSGSGTDFTFTISSLQPEDIATYFCQH | |
| | FDHLPLAFGCGTKVEIKRTVAAPSVFIFPP | |
| | SDEQLKSGTASVVCLLNNFYPREAKVQWKV | |
| | DNALQSGNSQESVTEQDSKDSTYSLSSTLT | |
| | LSKADYEKHKVYACEVTHQGLSSPVTKSFN | |
| | RGECGGGGSGGGGSGGGGSEPKSSDKTHTC | |
| | PPCPAPELLGGPSVFLFPPKPKDTLMISRT | |
| | PEVTCVVVDVSHEDPEVKFNWYVDGVEVHN | |
| | AKTKPREEQYNSTYRVVSVLTVLHQDWLNG | |
| | KEYKCKVSNKALPAPIEKTISKAKGQPREP | |
| | QVYTLPPCREEMTKNQVSLWCLVKGFYPSD | |
| | IAVEWESNGQPENNYKTTPPVLDSDGSFFL | |
| | YSKLTVDKSRWQQGNVFSCSVMHEALHNHY | |
| | TQKSLSLSPGK | |
| EGM04 HC | QVQLVQSGAEVKKPGASVKVSCKASGYTFT | 596 |
| | SHWMHWVRQAPGQCLEWIGEFNPSNGRTNY | |
| | NEKFKSKATMTVDTSTNTAYMELSSLRSED | |
| | TAVYYCASRDYDYDGRYFDYWGQGTLVTVS | |
| | SASTKGPSVFPLAPSSKSTSGGTAALGCLV | |
| | KDYFPEPVTVSWNSGALTSGVHTFPAVLQS | |
| | SGLYSLSSVVTVPSSSLGTQTYICNVNHKP | |
| | SNTKVDKKVEPKSCDKTHTCPPCPAPELLG | |
| | GPSVFLFPPKPKDTLMISRTPEVTCVVVDV | |
| | SHEDPEVKFNWYVDGVEVHNAKTKPREEQY | |
| | NSTYRVVSVLTVLHQDWLNGKEYKCKVSNK | |
| | ALPAPIEKTISKAKGQPREPQVYTLPPCRE | |
| | EMTKNQVSLWCLVKGFYPSDIAVEWESNGQ | |
| | PENNYKTTPPVLDSDGSFFLYSKLTVDKSR | |
| | WQQGNVFSCSVMHEALHNHYTQKSLSLSPG | |
| | KDIQMTQSPSSLSASVGDRVTITCSASSSV | |
| EGM04 LC | TYMYWYQQKPGKAPKLLI | 597 |
| | YDTSNLASGVPSRFSGSGSGTDYTFTISSL | |
| | QPEDIATYYCQQWSSHIFTFGCGTKVEIKR | |
| | TVAAPSVFIFPPSDEQLKSGTASVVCLLNN | |
| | FYPREAKVQWKVDNALQSGNSQESVTEQDS | |
| | KDSTYSLSSTLTLSKADYEKHKVYACEVTH | |
| | QGLSSPVTKSFNRGECGGGGSGGGGSGGGG | |
| | SEPKSSDKTHTCPPCPAPELLGGPSVFLFP | |
| | PKPKDTLMISRTPEVTCVVVDVSHEDPEVK | |
| | FNWYVDGVEVHNAKTKPREEQYNSTYRVVS | |
| | VLTVLHQDWLNGKEYKCKVSNKALPAPIEK | |
| | TISKAKGQPREPQVYTLPPCREEMTKNQVS | |
| | LWCLVKGFYPSDIAVEWESNGQPENNYKTT | |
| | PPVLDSDGSFFLYSKLTVDKSRWQQGNVFS | |
| | CSVMHEALHNHYTQKSLSLSPGK | |
| EGM05 HC | QVQLVQSGAEVKKPGSSVKVSCKASGFTFT | \|598 |
| | DYKIHWVRQAPGQCLEWMGYFNPNSGYSTY | |
| | AQKFQGRVTITADKSTSTAYMELSSLRSED | |
| | TAVYYCARLSPGGYYVMDAWGQGTTVTVSS | |
| | ASTKGPSVFPLAPSSKSTSGGTAALGCLVK | |
| | DYFPEPVTVSWNSGALTSGVHTFPAVLQSS | |
| | GLYSLSSVVTVPSSSLGTQTYICNVNHKPS | |
| | NTKVDKKVEPKSCDKTHTCPPCPAPELLGG | |
| | PSVFLFPPKPKDTLMISRTPEVTCVVVDVS | |
| | HEDPEVKFNWYVDGVEVHNAKTKPREEQYN | |
| | STYRVVSVLTVLHQDWLNGKEYKCKVSNKA | |
| | LPAPIEKTISKAKGQPREPQVYTLPPCREE | |
| | MTKNQVSLWCLVKGFYPSDIAVEWESNGQP | |
| | ENNYKTTPPVLDSDGSFFLYSKLTVDKSRW | |
| | QQGNVFSCSVMHEALHNHYTQKSLSLSPGK | |
| EGM05 LC | DIQMTQSPSSLSASVGDRVTITCRASQGIN | \|599 |
| | NYLNWYQQKPGKAPKRLIYNTNNLQTGVPS | |
| | RFSGSGSGTEFTLTISSLQPEDFATYYCLQ | |
| | HNSFPTFGCGTKLEIKRTVAAPSVFIFPPS | |
| | DEQLKSGTASVVCLLNNFYPREAKVQWKVD | |
| | NALQSGNSQESVTEQDSKDSTYSLSSTLTL | |
| | SKADYEKHKVYACEVTHQGLSSPVTKSFNR | |
| | GECGGGGSGGGGSGGGGSEPKSSDKTHTCP | |
| | PCPAPELLGGPSVFLFPPKPKDTLMISRTP | |
| | EVTCVVVDVSHEDPEVKFNWYVDGVEVHNA | |
| | KTKPREEQYNSTYRVVSVLTVLHQDWLNGK | |
| | EYKCKVSNKALPAPIEKTISKAKGQPREPQ | |
| | VYTLPPCREEMTKNQVSLWCLVKGFYPSDI | |
| | AVEWESNGQPENNYKTTPPVLDSDGSFFLY | |
| | SKLTVDKSRWQQGNVFSCSVMHEALHNHYT | |
| | QKSLSLSPGK | |

[0386] Table 63 below shows the heavy chain and light chain nucleotide sequences of the engineered antibodies targeting EGFR.

TABLE 63

| Name | Sequence | SEQ ID NO |
|---|---|---|
| EGM01 HC | CAAGTACAGTTGAAACAATCAGGGCCTGGTTTGGTGCAGC | 600 |
| | CTTCCCAATCACTTAGCATCACCTGCACTGTCTCAGGGTT | |
| | CAGTCTTACAAACTACGGCGTACACTGGGTACGGCAAAGC | |
| | CCTGGTAAGTGCCTGGAGTGGCTTGGGGTTATATGGTCTG | |
| | GAGGGAATACCGACTATAACACACCCTTTACCAGCAGGCT | |
| | GTCCATCAATAAAGATAACTCTAAATCCCAGGTCTTCTTT | |
| | AAAATGAACTCCCTCCAGTCTAATGACACTGCCATATATT | |
| | ACTGTGCTAGAGCATTGACTTACTACGATTATGAGTTCGC | |
| | ATATTGGGGACAGGGTACTCTGGTCACCGTATCCGCTGCT | |
| | AGCACCAAAGGACCTAGTGTTTTTCCTCTTGCCCCTTCCT | |
| | CAAAGTCTACCTCTGGGGGGACAGCCGCTCTGGGCTGCCT | |
| | GGTCAAGGATTATTTCCCAGAGCCTGTCACTGTCAGTTGG | |
| | AACTCTGGAGCCTTGACTTCTGGTGTTCATACATTTCCTG | |
| | CTGTCCTTCAAAGCAGCGGCTTGTACTCATTGTCTTCTGT | |
| | TGTGACAGTACCCTCAAGCAGCCTCGGCACTCAGACATAC | |
| | ATCTGCAATGTCAACCACAAACCCTCAAATACAAAGGTAG | |
| | ATAAAAAAGTCGAACCAAAGTCTTGTGACAAAACTCACAC | |
| | GTGCCCACCGTGCCCAGCACCTGAACTCCTGGGGGGACCG | |
| | TCAGTCTTCCTCTTCCCCCCAAAACCCAAGGACACCCTCA | |
| | TGATCTCCCGGACCCCTGAGGTCACATGCGTGGTGGTGGA | |
| | CGTGAGCCACGAAGACCCTGAGGTCAAGTTCAACTGGTAC | |
| | GTGGACGGCGTGGAGGTGCATAATGCCAAGACAAAGCCGC | |
| | GGGAGGAGCAGTACAACAGCACGTACCGTGTGGTCAGCGT | |
| | CCTCACCGTCCTGCACCAGGACTGGCTGAATGGCAAGGAG | |
| | TACAAGTGCAAGGTCTCCAACAAAGCCCTCCCAGCCCCCA | |
| | TCGAGAAAACCATCTCCAAAGCCAAAGGGCAGCCCCGAGA | |
| | ACCACAGGTGTACACCCTGCCCCCATGCCGGGAGGAGATG | |
| | ACCAAGAACCAGGTCAGCCTGTGGTGCCTGGTCAAAGGCT | |
| | TCTATCCCAGCGACATCGCCGTGGAGTGGGAGAGCAATGG | |
| | GCAGCCGGAGAACAACTACAAGACCACGCCTCCCGTGCTG | |
| | GACTCCGACGGCTCCTTCTTCCTCTACAGCAAGCTCACCG | |
| | TGGACAAGAGCAGGTGGCAGCAGGGGAACGTCTTCTCATG | |
| | CTCCGTGATGCATGAGGCTCTGCACAACCACTACACGCAG | |
| | AAGAGCCTCTCCCTGTCTCCGGGTAAA | |
| EGM01 LC | GACATCTTGCTTACTCAATCACCTGTAATACTTTCAGTTT | 601 |
| | CACCAGGTGAACGCGTTAGCTTCTCTTGTAGAGCCTCCCA | |
| | ATCTATAGGTACTAATATCCATTGGTATCAGCAGAGAACC | |
| | AACGGGTCTCCTCGTTTGCTCATTAAATATGCAAGCGAAT | |
| | CAATCTCAGGGATTCCTAGCCGTTTTAGTGGCTCTGGCAG | |
| | TGGTACTGATTTCACACTCAGCATCAATTCTGTAGAGAGC | |
| | GAAGATATTGCAGACTACTATTGCCAACAGAACAATAATT | |
| | GGCCCACAACCTTCGGGTGTGGCACAAAATTGGAACTCAA | |
| | ACGTACGGTGGCAGCTCCCAGCGTTTTTATCTTTCCCCCA | |
| | TCCGACGAGCAGCTCAAGAGTGGCACTGCCTCTGTAGTTT | |
| | GTTTGCTGAATAACTTCTATCCACGTGAAGCAAAAGTACA | |
| | GTGGAAGGTCGATAATGCCCTTCAGAGCGGTAACAGCCAA | |
| | GAAAGTGTTACCGAGCAAGATTCCAAAGATTCCACTTACA | |
| | GTCTGTCCAGCACATTGACACTGAGTAAGGCTGATTACGA | |
| | AAAACACAAGGTGTACGCATGCGAGGTGACACACCAAGGT | |
| | CTTTCATCTCCTGTAACTAAGAGCTTTAACCGGGGAGAAT | |
| | GTGGTGGTGGGGGCAGCGGGGGCGGAGGTAGTGGAGGCGG | |
| | CGGTAGTGAACCAAAGAGTAGTGACAAAACTCACACGTGC | |
| | CCACCGTGCCCAGCACCTGAACTCCTGGGGGGACCGTCAG | |
| | TCTTCCTCTTCCCCCCAAAACCCAAGGACACCCTCATGAT | |
| | CTCCCGGACCCCTGAGGTCACATGCGTGGTGGTGGACGTG | |
| | AGCCACGAAGACCCTGAGGTCAAGTTCAACTGGTACGTGG | |
| | ACGGCGTGGAGGTGCATAATGCCAAGACAAAGCCGCGGGA | |
| | GGAGCAGTACAACAGCACGTACCGTGTGGTCAGCGTCCTC | |
| | ACCGTCCTGCACCAGGACTGGCTGAATGGCAAGGAGTACA | |
| | AGTGCAAGGTCTCCAACAAAGCCCTCCCAGCCCCCATCGA | |
| | GAAAACCATCTCCAAAGCCAAAGGGCAGCCCCGAGAACCA | |
| | CAGGTGTACACCCTGCCCCCATGCCGGGAGGAGATGACCA | |
| | AGAACCAGGTCAGCCTGTGGTGCCTGGTCAAAGGCTTCTA | |
| | TCCCAGCGACATCGCCGTGGAGTGGGAGAGCAATGGGCAG | |
| | CCGGAGAACAACTACAAGACCACGCCTCCCGTGCTGGACT | |
| | CCGACGGCTCCTTCTTCCTCTACAGCAAGCTCACCGTGGA | |
| | CAAGAGCAGGTGGCAGCAGGGGAACGTCTTCTCATGCTCC | |
| | GTGATGCATGAGGCTCTGCACAACCACTACACGCAGAAGA | |
| | GCCTCTCCCTGTCTCCGGGTAAA | |
| EGM02 HC | CAAGTGCAGCTTCAAGAGTCTGGACCAGGGCTGGTCAAGC | 602 |
| | CCTCCCAAACCTTGAGCCTCACCTGTACTGTTTCCGGGGG | |
| | CAGCATAAGTTCTGGTGATTACTACTGGAGTTGGATACGC | |
| | CAACCTCCCGGAAAATGTCTGGAGTGGATTGGGTATATCT | |
| | ATTATAGTGGCTCAACAGACTACAATCCTTCTCTCAAGAG | |
| | TCGGGTAACTATGAGCGTAGATACAAGTAAAAACCAATTT | |
| | TCCCTTAAAGTCAATAGCGTTACAGCCGCTGACACTGCAG | |
| | TTTACTACTGTGCCCGTGTTTCAATCTTCGGTGTCGGCAC | |
| | TTTCGATTACTGGGGTCAGGGTACTCTGGTTACCGTGTCA | |
| | TCCGCTAGCACCAAAGGACCTAGTGTTTTTCCTCTTGCCC | |
| | CTTCCTCAAAGTCTACCTCTGGGGGGACAGCCGCTCTGGG | |
| | CTGCCTGGTCAAGGATTATTTCCCAGAGCCTGTCACTGTC | |
| | AGTTGGAACTCTGGAGCCTTGACTTCTGGTGTTCATACAT | |
| | TTCCTGCTGTCCTTCAAAGCAGCGGCTTGTACTCATTGTC | |
| | TTCTGTTGTGACAGTACCCTCAAGCAGCCTCGGCACTCAG | |
| | ACATACATCTGCAATGTCAACCACAAACCCTCAAATACAA | |
| | AGGTAGATAAAAAAGTCGAACCAAAGTCTTGTGACAAAAC | |
| | TCACACGTGCCCACCGTGCCCAGCACCTGAACTCCTGGGG | |
| | GGACCGTCAGTCTTCCTCTTCCCCCCAAAACCCAAGGACA | |
| | CCCTCATGATCTCCCGGACCCCTGAGGTCACATGCGTGGT | |
| | GGTGGACGTGAGCCACGAAGACCCTGAGGTCAAGTTCAAC | |
| | TGGTACGTGGACGGCGTGGAGGTGCATAATGCCAAGACAA | |
| | AGCCGCGGGAGGAGCAGTACAACAGCACGTACCGTGTGGT | |
| | CAGCGTCCTCACCGTCCTGCACCAGGACTGGCTGAATGGC | |
| | AAGGAGTACAAGTGCAAGGTCTCCAACAAAGCCCTCCCAG | |
| | CCCCCATCGAGAAAACCATCTCCAAAGCCAAAGGGCAGCC | |
| | CCGAGAACCACAGGTGTACACCCTGCCCCCATGCCGGGAG | |
| | GAGATGACCAAGAACCAGGTCAGCCTGTGGTGCCTGGTCA | |
| | AAGGCTTCTATCCCAGCGACATCGCCGTGGAGTGGGAGAG | |
| | CAATGGGCAGCCGGAGAACAACTACAAGACCACGCCTCCC | |
| | GTGCTGGACTCCGACGGCTCCTTCTTCCTCTACAGCAAGC | |
| | TCACCGTGGACAAGAGCAGGTGGCAGCAGGGGAACGTCTT | |
| | CTCATGCTCCGTGATGCATGAGGCTCTGCACAACCACTAC | |
| | ACGCAGAAGAGCCTCTCCCTGTCTCCGGGTAAA | |
| EGM02 LC | GAGATTGTTATGACCCAAAGCCCTGCAACACTTAGTTTGT | 603 |
| | CTCCAGGAGAGCGCGCCACCCTTTCTTGTCGTGCATCCCA | |
| | AAGCGTTAGCAGCTATCTCGCCTGGTATCAGCAGAAACCC | |
| | GGACAGGCTCCACGATTGCTGATCTACGACGCAAGTAATA | |
| | GAGCTACAGGAATACCTGCTCGTTTCTCAGGCTCTGGATC | |
| | TGGCACTGATTTCACCTTGACCATAAGCAGCCTGGAGCCC | |
| | GAGGATTTCGCTGTATATTATTGCCATCAATACGGGAGTA | |
| | CCCCCCTCACATTCGGTTGCGGGACTAAGGCCGAAATTAA | |
| | ACGTACGGTGGCAGCTCCCAGCGTTTTTATCTTTCCCCCA | |
| | TCCGACGAGCAGCTCAAGAGTGGCACTGCCTCTGTAGTTT | |
| | GTTTGCTGAATAACTTCTATCCACGTGAAGCAAAAGTACA | |
| | GTGGAAGGTCGATAATGCCCTTCAGAGCGGTAACAGCCAA | |
| | GAAAGTGTTACCGAGCAAGATTCCAAAGATTCCACTTACA | |
| | GTCTGTCCAGCACATTGACACTGAGTAAGGCTGATTACGA | |
| | AAAACACAAGGTGTACGCATGCGAGGTGACACACCAAGGT | |
| | CTTTCATCTCCTGTAACTAAGAGCTTTAACCGGGGAGAAT | |
| | GTGGTGGTGGGGGCAGCGGGGGCGGAGGTAGTGGAGGCGG | |
| | CGGTAGTGAACCAAAGAGTAGTGACAAAACTCACACGTGC | |
| | CCACCGTGCCCAGCACCTGAACTCCTGGGGGGACCGTCAG | |
| | TCTTCCTCTTCCCCCCAAAACCCAAGGACACCCTCATGAT | |
| | CTCCCGGACCCCTGAGGTCACATGCGTGGTGGTGGACGTG | |
| | AGCCACGAAGACCCTGAGGTCAAGTTCAACTGGTACGTGG | |
| | ACGGCGTGGAGGTGCATAATGCCAAGACAAAGCCGCGGGA | |
| | GGAGCAGTACAACAGCACGTACCGTGTGGTCAGCGTCCTC | |
| | ACCGTCCTGCACCAGGACTGGCTGAATGGCAAGGAGTACA | |
| | AGTGCAAGGTCTCCAACAAAGCCCTCCCAGCCCCCATCGA | |
| | GAAAACCATCTCCAAAGCCAAAGGGCAGCCCCGAGAACCA | |
| | CAGGTGTACACCCTGCCCCCATGCCGGGAGGAGATGACCA | |
| | AGAACCAGGTCAGCCTGTGGTGCCTGGTCAAAGGCTTCTA | |
| | TCCCAGCGACATCGCCGTGGAGTGGGAGAGCAATGGGCAG | |
| | CCGGAGAACAACTACAAGACCACGCCTCCCGTGCTGGACT | |
| | CCGACGGCTCCTTCTTCCTCTACAGCAAGCTCACCGTGGA | |
| | CAAGAGCAGGTGGCAGCAGGGGAACGTCTTCTCATGCTCC | |
| | GTGATGCATGAGGCTCTGCACAACCACTACACGCAGAAGA | |
| | GCCTCTCCCTGTCTCCGGGTAAA | |
| EGM03 HC | CAGGTACAACTTCAAGAAAGTGGTCCAGGTCTTGTAAAAC | 604 |
| | CCTCAGAAACTTTGAGTCTCACTTGTACCGTCAGTGGCGG | |
| | AAGTGTAAGTTCTGGCGATTACTACTGGACCTGGATACGC | |
| | CAGTCTCCAGGCAAATGTCTGGAGTGGATAGGCCACATCT | |
| | ACTACAGCGGGAACACCAATTACAATCCATCTCTTAAATC | |
| | AAGGTTGACAATTTCAATAGACACCAGTAAGACCCAGTTT | |
| | TCTCTCAAACTTAGCAGTGTAACAGCAGCAGATACTGCAA | |
| | TCTACTACTGCGTTAGAGACCGTGTTACAGGGGCTTTCGA | |
| | CATCTGGGGGCAGGGAACTATGGTTACCGTCTCTTCTGCT | |
| | AGCACCAAAGGACCTAGTGTTTTTCCTCTTGCCCCTTCCT | |
| | CAAAGTCTACCTCTGGGGGGACAGCCGCTCTGGGCTGCCT | |
| | GGTCAAGGATTATTTCCCAGAGCCTGTCACTGTCAGTTGG | |
| | AACTCTGGAGCCTTGACTTCTGGTGTTCATACATTTCCTG | |
| | CTGTCCTTCAAAGCAGCGGCTTGTACTCATTGTCTTCTGT | |
| | TGTGACAGTACCCTCAAGCAGCCTCGGCACTCAGACATAC | |
| | ATCTGCAATGTCAACCACAAACCCTCAAATACAAAGGTAG | |
| | ATAAAAAAGTCGAACCAAAGTCTTGTGACAAAACTCACAC | |
| | GTGCCCACCGTGCCCAGCACCTGAACTCCTGGGGGGACCG | |
| | TCAGTCTTCCTCTTCCCCCCAAAACCCAAGGACACCCTCA | |
| | TGATCTCCCGGACCCCTGAGGTCACATGCGTGGTGGTGGA | |
| | CGTGAGCCACGAAGACCCTGAGGTCAAGTTCAACTGGTAC | |
| | GTGGACGGCGTGGAGGTGCATAATGCCAAGACAAAGCCGC | |
| | GGGAGGAGCAGTACAACAGCACGTACCGTGTGGTCAGCGT | |
| | CCTCACCGTCCTGCACCAGGACTGGCTGAATGGCAAGGAG | |
| | TACAAGTGCAAGGTCTCCAACAAAGCCCTCCCAGCCCCCA | |
| | TCGAGAAAACCATCTCCAAAGCCAAAGGGCAGCCCCGAGA | |
| | ACCACAGGTGTACACCCTGCCCCCATGCCGGGAGGAGATG | |
| | ACCAAGAACCAGGTCAGCCTGTGGTGCCTGGTCAAAGGCT | |
| | TCTATCCCAGCGACATCGCCGTGGAGTGGGAGAGCAATGG | |
| | GCAGCCGGAGAACAACTACAAGACCACGCCTCCCGTGCTG | |
| | GACTCCGACGGCTCCTTCTTCCTCTACAGCAAGCTCACCG | |
| | TGGACAAGAGCAGGTGGCAGCAGGGGAACGTCTTCTCATG | |
| | CTCCGTGATGCATGAGGCTCTGCACAACCACTACACGCAG | |
| | AAGAGCCTCTCCCTGTCTCCGGGTAAA | |
| EGM03 LC | GACATACAGATGACACAGAGTCCTAGCTCATTGTCAGCCT | 605 |
| | CTGTCGGTGACCGCGTCACTATCACCTGCCAAGCCAGCCA | |
| | AGACATATCAAATTATCTTAACTGGTACCAGCAAAAGCCT | |
| | GGAAAGGCTCCAAAACTGCTGATTTACGACGCCTCTAATT | |
| | TGGAGACCGGGGTTCCCTCTAGGTTCAGCGGGTCTGGTTC | |
| | AGGCACCGACTTTACATTCACTATCTCAAGTCTCCAGCCA | |
| | GAGGACATCGCTACATACTTTTGCCAACATTTTGACCATC | |
| | TGCCCCTGGCATTTGGGTGTGGCACCAAGGTAGAAATTAA | |
| | GCGTACGGTGGCAGCTCCCAGCGTTTTTATCTTTCCCCCA | |
| | TCCGACGAGCAGCTCAAGAGTGGCACTGCCTCTGTAGTTT | |
| | GTTTGCTGAATAACTTCTATCCACGTGAAGCAAAAGTACA | |
| | GTGGAAGGTCGATAATGCCCTTCAGAGCGGTAACAGCCAA | |
| | GAAAGTGTTACCGAGCAAGATTCCAAAGATTCCACTTACA | |
| | GTCTGTCCAGCACATTGACACTGAGTAAGGCTGATTACGA | |
| | AAAACACAAGGTGTACGCATGCGAGGTGACACACCAAGGT | |
| | CTTTCATCTCCTGTAACTAAGAGCTTTAACCGGGGAGAAT | |
| | GTGGTGGTGGGGGCAGCGGGGGCGGAGGTAGTGGAGGCGG | |
| | CGGTAGTGAACCAAAGAGTAGTGACAAAACTCACACGTGC | |
| | CCACCGTGCCCAGCACCTGAACTCCTGGGGGGACCGTCAG | |
| | TCTTCCTCTTCCCCCCAAAACCCAAGGACACCCTCATGAT | |
| | CTCCCGGACCCCTGAGGTCACATGCGTGGTGGTGGACGTG | |
| | AGCCACGAAGACCCTGAGGTCAAGTTCAACTGGTACGTGG | |
| | ACGGCGTGGAGGTGCATAATGCCAAGACAAAGCCGCGGGA | |
| | GGAGCAGTACAACAGCACGTACCGTGTGGTCAGCGTCCTC | |
| | ACCGTCCTGCACCAGGACTGGCTGAATGGCAAGGAGTACA | |
| | AGTGCAAGGTCTCCAACAAAGCCCTCCCAGCCCCCATCGA | |
| | GAAAACCATCTCCAAAGCCAAAGGGCAGCCCCGAGAACCA | |
| | CAGGTGTACACCCTGCCCCCATGCCGGGAGGAGATGACCA | |
| | AGAACCAGGTCAGCCTGTGGTGCCTGGTCAAAGGCTTCTA | |
| | TCCCAGCGACATCGCCGTGGAGTGGGAGAGCAATGGGCAG | |
| | CCGGAGAACAACTACAAGACCACGCCTCCCGTGCTGGACT | |
| | CCGACGGCTCCTTCTTCCTCTACAGCAAGCTCACCGTGGA | |
| | CAAGAGCAGGTGGCAGCAGGGGAACGTCTTCTCATGCTCC | |
| | GTGATGCATGAGGCTCTGCACAACCACTACACGCAGAAGA | |
| | GCCTCTCCCTGTCTCCGGGTAAA | |
| EGM04 HC | CAAGTCCAACTGGTCCAATCTGGGGCAGAGGTCAAGAAAC | 606 |
| | CTGGCGCAAGCGTAAAGGTATCCTGTAAAGCATCTGGCTA | |
| | CACATTCACTTCACATTGGATGCACTGGGTTCGGCAGGCA | |
| | CCTGGGCAATGTCTTGAATGGATTGGGGAGTTTAACCCCA | |
| | GTAACGGGAGGACTAACTACAATGAAAAGTTCAAGTCCAA | |
| | AGCAACCATGACCGTCGATACCAGCACAAACACTGCCTAC | |
| | ATGGAACTTTCATCATTGCGATCTGAAGACACAGCAGTAT | |
| | ATTACTGTGCCAGTAGGGATTACGACTACGACGGTCGCTA | |
| | CTTCGACTATTGGGGGCAAGGTACTTTGGTAACAGTGAGT | |
| | AGTGCTAGCACCAAAGGACCTAGTGTTTTTCCTCTTGCCC | |
| | CTTCCTCAAAGTCTACCTCTGGGGGGACAGCCGCTCTGGG | |
| | CTGCCTGGTCAAGGATTATTTCCCAGAGCCTGTCACTGTC | |
| | AGTTGGAACTCTGGAGCCTTGACTTCTGGTGTTCATACAT | |
| | TTCCTGCTGTCCTTCAAAGCAGCGGCTTGTACTCATTGTC | |
| | TTCTGTTGTGACAGTACCCTCAAGCAGCCTCGGCACTCAG | |
| | ACATACATCTGCAATGTCAACCACAAACCCTCAAATACAA | |
| | AGGTAGATAAAAAAGTCGAACCAAAGTCTTGTGACAAAAC | |
| | TCACACGTGCCCACCGTGCCCAGCACCTGAACTCCTGGGG | |
| | GGACCGTCAGTCTTCCTCTTCCCCCCAAAACCCAAGGACA | |
| | CCCTCATGATCTCCCGGACCCCTGAGGTCACATGCGTGGT | |
| | GGTGGACGTGAGCCACGAAGACCCTGAGGTCAAGTTCAAC | |
| | TGGTACGTGGACGGCGTGGAGGTGCATAATGCCAAGACAA | |
| | AGCCGCGGGAGGAGCAGTACAACAGCACGTACCGTGTGGT | |
| | CAGCGTCCTCACCGTCCTGCACCAGGACTGGCTGAATGGC | |
| | AAGGAGTACAAGTGCAAGGTCTCCAACAAAGCCCTCCCAG | |
| | CCCCCATCGAGAAAACCATCTCCAAAGCCAAAGGGCAGCC | |
| | CCGAGAACCACAGGTGTACACCCTGCCCCCATGCCGGGAG | |
| | GAGATGACCAAGAACCAGGTCAGCCTGTGGTGCCTGGTCA | |
| | AAGGCTTCTATCCCAGCGACATCGCCGTGGAGTGGGAGAG | |
| | CAATGGGCAGCCGGAGAACAACTACAAGACCACGCCTCCC | |
| | GTGCTGGACTCCGACGGCTCCTTCTTCCTCTACAGCAAGC | |
| | TCACCGTGGACAAGAGCAGGTGGCAGCAGGGGAACGTCTT | |
| | CTCATGCTCCGTGATGCATGAGGCTCTGCACAACCACTAC | |
| | ACGCAGAAGAGCCTCTCCCTGTCTCCGGGTAAA | |
| EGM04 LC | GACATACAGATGACACAATCCCCATCTAGCCTGTCCGCAA | 607 |
| | GTGTTGGGGACCGTGTCACTATAACATGCTCAGCATCATC | |
| | ATCAGTGACTTATATGTACTGGTACCAGCAAAAGCCCGGA | |
| | AAGGCACCTAAACTGCTCATTTATGACACCAGCAATCTTG | |
| | CTTCCGGGGTTCCTTCTCGATTTTCCGGTTCTGGCAGCGG | |
| | TACTGACTATACTTTTACTATCAGTTCTCTGCAACCTGAA | |
| | GACATCGCAACTTACTATTGTCAACAATGGTCCAGCCACA | |
| | TCTTTACTTTTGGATGTGGGACAAAAGTCGAAATTAAACG | |
| | TACGGTGGCAGCTCCCAGCGTTTTTATCTTTCCCCCATCC | |
| | GACGAGCAGCTCAAGAGTGGCACTGCCTCTGTAGTTTGTT | |
| | TGCTGAATAACTTCTATCCACGTGAAGCAAAAGTACAGTG | |
| | GAAGGTCGATAATGCCCTTCAGAGCGGTAACAGCCAAGAA | |
| | AGTGTTACCGAGCAAGATTCCAAAGATTCCACTTACAGTC | |
| | TGTCCAGCACATTGACACTGAGTAAGGCTGATTACGAAAA | |
| | ACACAAGGTGTACGCATGCGAGGTGACACACCAAGGTCTT | |
| | TCATCTCCTGTAACTAAGAGCTTTAACCGGGGAGAATGTG | |
| | GTGGTGGGGGCAGCGGGGGCGGAGGTAGTGGAGGCGGCGG | |
| | TAGTGAACCAAAGAGTAGTGACAAAACTCACACGTGCCCA | |
| | CCGTGCCCAGCACCTGAACTCCTGGGGGGACCGTCAGTCT | |
| | TCCTCTTCCCCCCAAAACCCAAGGACACCCTCATGATCTC | |
| | CCGGACCCCTGAGGTCACATGCGTGGTGGTGGACGTGAGC | |
| | CACGAAGACCCTGAGGTCAAGTTCAACTGGTACGTGGACG | |
| | GCGTGGAGGTGCATAATGCCAAGACAAAGCCGCGGGAGGA | |
| | GCAGTACAACAGCACGTACCGTGTGGTCAGCGTCCTCACC | |
| | GTCCTGCACCAGGACTGGCTGAATGGCAAGGAGTACAAGT | |
| | GCAAGGTCTCCAACAAAGCCCTCCCAGCCCCCATCGAGAA | |
| | AACCATCTCCAAAGCCAAAGGGCAGCCCCGAGAACCACAG | |
| | GTGTACACCCTGCCCCCATGCCGGGAGGAGATGACCAAGA | |
| | ACCAGGTCAGCCTGTGGTGCCTGGTCAAAGGCTTCTATCC | |
| | CAGCGACATCGCCGTGGAGTGGGAGAGCAATGGGCAGCCG | |
| | GAGAACAACTACAAGACCACGCCTCCCGTGCTGGACTCCG | |
| | ACGGCTCCTTCTTCCTCTACAGCAAGCTCACCGTGGACAA | |
| | GAGCAGGTGGCAGCAGGGGAACGTCTTCTCATGCTCCGTG | |
| | ATGCATGAGGCTCTGCACAACCACTACACGCAGAAGAGCC | |
| | TCTCCCTGTCTCCGGGTAAA | |
| EGM05 HC | CAAGTACAACTTGTTCAATCTGGAGCAGAGGTTAAGAAAC | 608 |
| | CCGGATCTTCCGTTAAGGTTAGTTGCAAGGCCTCCGGGTT | |
| | TACTTTCACTGACTATAAAATCCATTGGGTCCGGCAGGCC | |
| | CCTGGGCAGTGTCTTGAATGGATGGGCTACTTCAACCCAA | |
| | ATTCTGGTTATTCCACTTATGCCCAGAAGTTTCAAGGCAG | |
| | GGTCACCATCACTGCCGACAAGTCTACTTCAACCGCCTAT | |
| | ATGGAACTTAGCAGTCTGCGATCAGAGGATACAGCAGTCT | |
| | ACTACTGCGCCAGACTGTCACCCGGCGGTTATTATGTGAT | |
| | GGATGCTTGGGGCCAGGGCACCACTGTTACAGTATCCTCT | |
| | GCTAGCACCAAAGGACCTAGTGTTTTTCCTCTTGCCCCTT | |
| | CCTCAAAGTCTACCTCTGGGGGGACAGCCGCTCTGGGCTG | |
| | CCTGGTCAAGGATTATTTCCCAGAGCCTGTCACTGTCAGT | |
| | TGGAACTCTGGAGCCTTGACTTCTGGTGTTCATACATTTC | |
| | CTGCTGTCCTTCAAAGCAGCGGCTTGTACTCATTGTCTTC | |
| | TGTTGTGACAGTACCCTCAAGCAGCCTCGGCACTCAGACA | |
| | TACATCTGCAATGTCAACCACAAACCCTCAAATACAAAGG | |
| | TAGATAAAAAAGTCGAACCAAAGTCTTGTGACAAAACTCA | |
| | CACGTGCCCACCGTGCCCAGCACCTGAACTCCTGGGGGGA | |
| | CCGTCAGTCTTCCTCTTCCCCCCAAAACCCAAGGACACCC | |
| | TCATGATCTCCCGGACCCCTGAGGTCACATGCGTGGTGGT | |
| | GGACGTGAGCCACGAAGACCCTGAGGTCAAGTTCAACTGG | |
| | TACGTGGACGGCGTGGAGGTGCATAATGCCAAGACAAAGC | |
| | CGCGGGAGGAGCAGTACAACAGCACGTACCGTGTGGTCAG | |
| | CGTCCTCACCGTCCTGCACCAGGACTGGCTGAATGGCAAG | |
| | GAGTACAAGTGCAAGGTCTCCAACAAAGCCCTCCCAGCCC | |
| | CCATCGAGAAAACCATCTCCAAAGCCAAAGGGCAGCCCCG | |
| | AGAACCACAGGTGTACACCCTGCCCCCATGCCGGGAGGAG | |
| | ATGACCAAGAACCAGGTCAGCCTGTGGTGCCTGGTCAAAG | |
| | GCTTCTATCCCAGCGACATCGCCGTGGAGTGGGAGAGCAA | |
| | TGGGCAGCCGGAGAACAACTACAAGACCACGCCTCCCGTG | |
| | CTGGACTCCGACGGCTCCTTCTTCCTCTACAGCAAGCTCA | |
| | CCGTGGACAAGAGCAGGTGGCAGCAGGGGAACGTCTTCTC | |
| | ATGCTCCGTGATGCATGAGGCTCTGCACAACCACTACACG | |
| | CAGAAGAGCCTCTCCCTGTCTCCGGGTAAA | |
| EGM05 LC | GACATTCAGATGACTCAGTCCCCATCCTCTCTGTCTGCCA | 609 |
| | GCGTGGGAGATAGGGTCACCATAACTTGTCGGGCATCCCA | |
| | AGGGATCAATAACTACCTCAATTGGTATCAACAAAAACCT | |
| | GGCAAGGCTCCTAAAAGGCTGATTTATAACACTAACAATC | |
| | TCCAAACCGGGGTGCCAAGTCGCTTTAGTGGGTCAGGGAG | |
| | TGGAACAGAGTTTACTCTTACTATCTCCAGCCTCCAGCCC | |
| | GAGGACTTTGCCACTTACTATTGCCTCCAACACAACTCAT | |
| | TTCCAACATTTGGTTGTGGCACTAAACTTGAAATTAAACG | |
| | TACGGTGGCAGCTCCCAGCGTTTTTATCTTTCCCCCATCC | |
| | GACGAGCAGCTCAAGAGTGGCACTGCCTCTGTAGTTTGTT | |
| | TGCTGAATAACTTCTATCCACGTGAAGCAAAAGTACAGTG | |
| | GAAGGTCGATAATGCCCTTCAGAGCGGTAACAGCCAAGAA | |
| | AGTGTTACCGAGCAAGATTCCAAAGATTCCACTTACAGTC | |
| | TGTCCAGCACATTGACACTGAGTAAGGCTGATTACGAAAA | |
| | ACACAAGGTGTACGCATGCGAGGTGACACACCAAGGTCTT | |
| | TCATCTCCTGTAACTAAGAGCTTTAACCGGGGAGAATGTG | |
| | GTGGTGGGGGCAGCGGGGGCGGAGGTAGTGGAGGCGGCGG | |
| | TAGTGAACCAAAGAGTAGTGACAAAACTCACACGTGCCCA | |
| | CCGTGCCCAGCACCTGAACTCCTGGGGGGACCGTCAGTCT | |
| | TCCTCTTCCCCCCAAAACCCAAGGACACCCTCATGATCTC | |
| | CCGGACCCCTGAGGTCACATGCGTGGTGGTGGACGTGAGC | |
| | CACGAAGACCCTGAGGTCAAGTTCAACTGGTACGTGGACG | |
| | GCGTGGAGGTGCATAATGCCAAGACAAAGCCGCGGGAGGA | |
| | GCAGTACAACAGCACGTACCGTGTGGTCAGCGTCCTCACC | |
| | GTCCTGCACCAGGACTGGCTGAATGGCAAGGAGTACAAGT | |
| | GCAAGGTCTCCAACAAAGCCCTCCCAGCCCCCATCGAGAA | |
| | AACCATCTCCAAAGCCAAAGGGCAGCCCCGAGAACCACAG | |
| | GTGTACACCCTGCCCCCATGCCGGGAGGAGATGACCAAGA | |
| | ACCAGGTCAGCCTGTGGTGCCTGGTCAAAGGCTTCTATCC | |
| | CAGCGACATCGCCGTGGAGTGGGAGAGCAATGGGCAGCCG | |
| | GAGAACAACTACAAGACCACGCCTCCCGTGCTGGACTCCG | |
| | ACGGCTCCTTCTTCCTCTACAGCAAGCTCACCGTGGACAA | |
| | GAGCAGGTGGCAGCAGGGGAACGTCTTCTCATGCTCCGTG | |
| | ATGCATGAGGCTCTGCACAACCACTACACGCAGAAGAGCC | |
| | TCTCCCTGTCTCCGGGTAAA | |

[0387] Table 64 below shows the polypeptide sequences of the heavy chain variable region (VH) and light chain variable region (VL) of the engineered antibodies targeting EGFR. Table 65 below shows the nucleotide sequences of the heavy chain variable region (VH) and light chain variable region (VL) of the engineered antibodies targeting EGFR.

TABLE 64

| | | | SEQ ID |
|---|---|---|---|
| Name | | Sequence | NO |
| EGM01 | VH | QVQLKQSGPGLVQPSQSLSITCTVS | 610 |
| | | GFSLTNYGVHWVRQSPGKCLEWLGV | |
| | | IWSGGNTDYNTPFTSRLSINKDNSK | |
| | | SQVFFKMNSLQSNDTAIYYCARALT | |
| | | YYDYEFAYWGQGTLVTVSA | |
| | VL | DILLTQSPVILSVSIGERVSFSCRA | 611 |
| | | SQSIGTNIHWYQQRTNGSPRLLIKY | |
| | | ASESISGIPSRFSGSGSGTDFTLSI | |
| | | NSVESEDIADYYCQQNNNWPTTFGC | |
| | | GTKLELK | |
| EGM02 | VH | QVQLQESGPGLVKPSQTLSLTCTVS | 612 |
| | | GGSISSGDYYWSWIRQPPGKCLEWI | |
| | | GYIYYSGSTDYNPSLKSRVTMSVDT | |
| | | SKNQFSLKVNSVTAADTAVYYCARV | |
| | | SIFGVGTFDYWGQGTLVTVSS | |
| | VL | EIVMTQSPATLSLSPGERATLSCRA | 613 |
| | | SQSVSSYLAWYQQKPGQAPRLLIYD | |
| | | ASNRATGIPARFSGSGSGTDFTLTI | |
| | | SSLEPEDFAVYYCHQYGSTPLTFGC | |
| | | GTKAEIK | |
| EGM03 | VH | QVQLQESGPGLVKPSETLSLTCTVS | 614 |
| | | GGSVSSGDYYWTWIRQSPGKCLEWI | |
| | | GHIYYSGNTNYNPSLKSRLTISIDT | |
| | | SKTQFSLKLSSVTAADTAIYYCVRD | |
| | | RVTGAFDIWGQGTMVTVSS | |
| | VL | DIQMTQSPSSLSASVGDRVTITCQA | 615 |
| | | SQDISNYLNWYQQKPGKAPKLLIYD | |
| | | ASNLETGVPSRFSGSGSGTDFTFTI | |
| | | SSLQPEDIATYFCQHFDHLPLAFGC | |
| | | GTKVEIK | |
| EGM04 | VH | [sequence omitted] | 616 |
| | | GYTFTSHWMHWVRQAPGQCLEWIGE | |
| | | FNPSNGRTNYNEKFKSKATMTVDTS | |
| | | TNTAVYNELSSLRSEDTAVYYCASR | |
| | | DYDYDGRYFDYWGQGTLVTVSS | |
| | VL | DIQMTQSPSSLSASVGDRVTITCSA | 617 |
| | | SSSVTYMYWYQQKPGKAPKLLIYDT | |
| | | SNLASGVPSRFSGSGSGTDYTFTIS | |
| | | SLQPEDIATTYCQQWSSHIFTFGQG | |
| | | TKVEIK | |
| EGM05 | VH | [sequence omitted] | 618 |
| | | GFTFTDVKIHWVRQAPGQCLEWMGY | |
| | | FNPNGSYSTYAQKFQGVTITADKST | |
| | | STAYMELSSLRSEDTAVYYCARLSP | |
| | | GGYYVMDAWGQGTTVTVSS | |
| | VL | DIQMTQSPSSLSASVGDRVTITCRA | 619 |
| | | SQGINNYLNWYQQKPGKAPKRLIYN | |
| | | TNNLQTGVPSRFSGSGSGTEFTLTI | |
| | | SSLQPEDFATYYCLQHNSFPTFGQG | |
| | | TKLEIK | |

TABLE 65

| Name | | Sequence | SEQ ID NO |
|---|---|---|---|
| EGM01 | VH | CAAGTACAGTTGAAACAATCAGGGCCTGGTTTGGTGCAGCCTTCCCAATCACTTAGCATCA | 620 |
| | | CCTGCACTGTCTCAGGGTTCAGTCTTACAAACTACGGCGTACACTGGGTACGGCAAAGCCC | |
| | | TGGTAAGTGCCTGGAGTGGCTTGGGGTTATATGGTCTGGAGGGAATACCGACTATAACACA | |
| | | CCCTTTACCAGCAGGCTGTCCATCAATAAAGATAACTCTAAATCCCAGGTCTTCTTTAAAA | |
| | | TGAACTCCCTCCAGTCTAATGACACTGCCATATATTACTGTGCTAGAGCATTGACTTACTA | |
| | | CCCTTTACCAGCAGGCTGTCCATCAATAAAGATAACTCTAAATCCCAGGTCTTCTTTAAAA | |
| | | TGAACTCCCTCCAGTCTAATGACACTGCCATATATTACTGTGCTAGAGCATTGACTTACTA | |
| | | CGATTATGAGTTCGCATATTGGGGACAGGGTACTCTGGTCACCGTATCCGCT | |
| | VL | GACATCTTGCTTACTCAATCACCTGTAATACTTTCAGTTTCACCAGGTGAACGCGTTAGCT | 621 |
| | | TCTCTTGTAGAGCCTCCCAATCTATAGGTACTAATATCCATTGGTATCAGCAGAGAACCAA | |
| | | CGGGTCTCCTCGTTTGCTCATTAAATATGCAAGCGAATCAATCTCAGGGATTCCTAGCCGT | |
| | | TTTAGTGGCTCTGGCAGTGGTACTGATTTCACACTCAGCATCAATTCTGTAGAGAGCGAAG | |
| | | ATATTGCAGACTACTATTGCCAACAGAACAATAATTGGCCCACAACCTTCGGGTGTGGCAC | |
| | | AAAATTGGAACTCAAA | |
| EMG02 | VH | CAAGTGCAGCTTCAAGAGTCTGGACCAGGGCTGGTCAAGCCCTCCCAAACCTTGAGCCTCA | 622 |
| | | CCTGTACTGTTTCCGGGGGCAGCATAAGTTCTGGTGATTACTACTGGAGTTGGATACGCCA | |
| | | ACCTCCCGGAAAATGTCTGGAGTGGATTGGGTATATCTATTATAGTGGCTCAACAGACTAC | |
| | | AATCCTTCTCTCAAGAGTCGGGTAACTATGAGCGTAGATACAAGTAAAAACCAATTTTCCC | |
| | | TTAAAGTCAATAGCGTTACAGCCGCTGACACTGCAGTTTACTACTGTGCCCGTGTTTCAAT | |
| | | CTTCGGTGTCGGCACTTTCGATTACTGGGGTCAGGGTACTCTGGTTACCGTGTCATCC | |
| | VL | GAGATTGTTATGACCCAAAGCCCTGCAACACTTAGTTTGTCTCCAGGAGAGCGCGCCACCC | 623 |
| | | TTTCTTGTCGTGCATCCCAAAGCGTTAGCAGCTATCTCGCCTGGTATCAGCAGAAACCCGG | |
| | | ACAGGCTCCACGATTGCTGATCTACGACGCAAGTAATAGAGCTACAGGAATACCTGCTCGT | |
| | | TTCTCAGGCTCTGGATCTGGCACTGATTTCACCTTGACCATAAGCAGCCTGGAGCCCGAGG | |
| | | ATTTCGCTGTATATTATTGCCATCAATACGGGAGTACCCCCCTCACATTCGGTTGCGGGAC | |
| | | TAAGGCCGAAATTAAA | |
| EMG03 | VH | GACATACAGATGACACAGAGTCCTAGCTCATTGTCAGCCTCTGTCGGTGACCGCGTCACTA | 624 |
| | | TCACCTGCCAAGCCAGCCAAGACATATCAAATTATCTTAACTGGTACCAGCAAAAGCCTGG | |
| | | AAAGGCTCCAAAACTGCTGATTTACGACGCCTCTAATTTGGAGACCGGGGTTCCCTCTAGG | |
| | | TTCAGCGGGTCTGGTTCAGGCACCGACTTTACATTCACTATCTCAAGTCTCCAGCCAGAGG | |
| | | ACATCGCTACATACTTTTGCCAACATTTTGACCATCTGCCCCTGGCATTTGGGTGTGGCAC | |
| | | CAAGGTAGAAATTAAG | |
| | VL | CAGGTACAACTTCAAGAAAGTGGTCCAGGTCTTGTAAAACCCTCAGAAACTTTGAGTCTCA | 625 |
| | | CTTGTACCGTCAGTGGCGGAAGTGTAAGTTCTGGCGATTACTACTGGACCTGGATACGCCA | |
| | | GTCTCCAGGCAAATGTCTGGAGTGGATAGGCCACATCTACTACAGCGGGAACACCAATTAC | |
| | | AATCCATCTCTTAAATCAAGGTTGACAATTTCAATAGACACCAGTAAGACCCAGTTTTCTC | |
| | | TCAAACTTAGCAGTGTAACAGCAGCAGATACTGCAATCTACTACTGCGTTAGAGACCGTGT | |
| | | TACAGGGGCTTTCGACATCTGGGGGCAGGGAACTATGGTTACCGTCTCTTCT | |
| EGM04 | VH | CAAGTCCAACTGGTCCAATCTGGGGCAGAGGTCAAGAAACCTGGCGCAAGCGTAAAGGTAT | 626 |
| | | CCTGTAAAGCATCTGGCTACACATTCACTTCACATTGGATGCACTGGGTTCGGCAGGCACC | |
| | | TGGGCAATGTCTTGAATGGATTGGGGAGTTTAACCCCAGTAACGGGAGGACTAACTACAAT | |
| | | GAAAAGTTCAAGTCCAAAGCAACCATGACCGTCGATACCAGCACAAACACTGCCTACATGG | |
| | | AACTTTCATCATTGCGATCTGAAGACACAGCAGTATATTACTGTGCCAGTAGGGATTACGA | |
| | | CTACGACGGTCGCTACTTCGACTATTGGGGGCAAGGTACTTTGGTAACAGTGAGTAGT | |
| | VL | GACATACAGATGACACAATCCCCATCTAGCCTGTCCGCAAGTGTTGGGGACCGTGTCACTA | 627 |
| | | TAACATGCTCAGCATCATCATCAGTGACTTATATGTACTGGTACCAGCAAAAGCCCGGAAA | |
| | | GGCACCTAAACTGCTCATTTATGACACCAGCAATCTTGCTTCCGGGGTTCCTTCTCGATTT | |
| | | TCCGGTTCTGGCAGCGGTACTGACTATACTTTTACTATCAGTTCTCTGCAACCTGAAGACA | |
| | | TCGCAACTTACTATTGTCAACAATGGTCCAGCCACATCTTTACTTTTGGATGTGGGACAAA | |
| | | AGTCGAAATTAAA | |
| EMG05 | VH | CAAGTACAACTTGTTCAATCTGGAGCAGAGGTTAAGAAACCCGGATCTTCCGTTAAGGTTA | 628 |
| | | GTTGCAAGGCCTCCGGGTTTACTTTCACTGACTATAAAATCCATTGGGTCCGGCAGGCCCC | |
| | | TGGGCAGTGTCTTGAATGGATGGGCTACTTCAACCCAAATTCTGGTTATTCCACTTATGCC | |
| | | CAGAAGTTTCAAGGCAGGGTCACCATCACTGCCGACAAGTCTACTTCAACCGCCTATATGG | |
| | | AACTTAGCAGTCTGCGATCAGAGGATACAGCAGTCTACTACTGCGCCAGACTGTCACCCGG | |
| | | CGGTTATTATGTGATGGATGCTTGGGGCCAGGGCACCACTGTTACAGTATCCTCT | |
| | VL | GACATTCAGATGACTCAGTCCCCATCCTCTCTGTCTGCCAGCGTGGGAGATAGGGTCACCA | 629 |
| | | TAACTTGTCGGGCATCCCAAGGGATCAATAACTACCTCAATTGGTATCAACAAAAACCTGG | |
| | | CAAGGCTCCTAAAAGGCTGATTTATAACACTAACAATCTCCAAACCGGGGTGCCAAGTCGC | |
| | | TTTAGTGGGTCAGGGAGTGGAACAGAGTTTACTCTTACTATCTCCAGCCTCCAGCCCGAGG | |
| | | ACTTTGCCACTTACTATTGCCTCCAACACAACTCATTTCCAACATTTGGTTGTGGCACTAA | |
| | | ACTTGAAATTAAA | |

[0388] Table 66 below shows the heavy chain and light chain CDR sequences of the engineered antibodies targeting EGFR.

TABLE 66

| Name | CDR | Sequence | SEQ ID NO |
|---|---|---|---|
| EGM01 | CDR-H1 | NYGVH | 175 |
| | CDR-H2 | VIWSGGNTDYNTPFTS | 176 |
| | CDR-H3 | ALTYYDYEFAY | 177 |
| | CDR-L1 | RASQSIGTNIH | 178 |
| | CDR-L2 | YASESIS | 179 |
| | CDR-L3 | QQNNNWPTT | 180 |
| EGM02 | CDR-H1 | DYYWS | 187 |
| | CDR-H2 | YIYYSGSTDYNPSLKS | 188 |
| | CDR-H3 | VSIFGVGTFDY | 189 |
| | CDR-L1 | RASQSVSSYLA | 190 |
| | CDR-L2 | DASNRAT | 191 |
| | CDR-L3 | HQYGSTPLT | 192 |
| EGM03 | CDR-H1 | DYYWT | 181 |
| | CDR-H2 | HIYYSGNTNYNPSLKS | 182 |
| | CDR-H3 | DRVTGAFDI | 183 |
| | CDR-L1 | QASQDISNYLN | 184 |
| | CDR-L2 | DASNLET | 185 |
| | CDR-L3 | QHFDHLPLA | 186 |
| EGM04 | CDR-H1 | SHWMH | 630 |
| | CDR-H2 | EFNPSNGRTNYNEKFKS | 631 |
| | CDR-H3 | RDYDYDGRYFDY | 632 |
| | CDR-L1 | SASSSVTYMY | 633 |
| | CDR-L2 | DTSNLAS | 634 |
| | CDR-L3 | QQWSSHIFT | 635 |
| EGM05 | CDR-H1 | DYKIH | 193 |
| | CDR-H2 | YFNPNSGYSTYAQKFQG | 194 |
| | CDR-H3 | LSPGGYYVMDA | 195 |
| | CDR-L1 | RASQGINNYLN | 196 |
| | CDR-L2 | NTNNLQT | 197 |
| | CDR-L3 | LQHNSFPT | 198 |

[0389] The EGFR protein binding constants of EGM01 to EGM05 were determined using the Octet Red96e (Sartorius). In order to analyze the binding constants of the antibodies, the antibodies were loaded onto the anti-human Fab-CH1 2nd generation (FAB2G) biosensor (Sartorius, 18-5125). Then, the human EGFR recombinant proteins (Sino Biologicals, 10692-H08H) were added in a binding reaction (300 seconds) and a dissociation reaction (600 seconds) at various concentrations (FIG. 49), and the affinities of antibodies for EGFR were calculated (FIG. 49, Table 67). Table 67 below illustrates the binding constants of the engineered antibodies targeting EGFR.

TABLE 67

| Antibodies | K_{D} (nM) | Kₐ (1/Ms) | K_{d} (1/s) |
|---|---|---|---|
| EGM01 | 0.6446 | 6.00E+05 | 3.87E−04 |
| EGM02 | 0.3946 | 7.30E+05 | 2.88E−04 |
| EGM03 | 0.1518 | 4.28E+05 | 6.51E−05 |
| EGM04 | 0.6421 | 6.31E+05 | 4.05E−04 |
| EGM05 | 0.1989 | 4.08E+05 | 8.11E−05 |

### Example 21. Design, Preparation and Analysis of Novel Antibody Targeting CD33

[0390] The variant light chain and heavy chain polypeptide sequences of the antibodies that specifically recognize the CD33 protein are shown in Table 68. For GPM01, expression vector consisting of the sequences corresponding to Fc-Hole (SEQ ID NO: 7), 33-1 HC (SEQ ID NO: 636), and 33-1 LC (SEQ ID NO: 637) were co-transfected into EXPICHO-S™ (Gibco, A29127) (FIG. 41a, Table 64), and purification and analysis were performed in the same manner as described in Example 1. Expression, purification and analysis were performed for 33-2, 33-3, 33-4, 33-5, 33-6, and 33-7 in the same manner as mentioned above (FIGS. 41a to 41b, and Tables 68 and Table 69). 33-1, 33-2, and 33-3 bind monovalently to different epitopes of the antigen and have structures consisting of two Fc domains (FIG. 41a). 33-4, 33-5, 33-6, and 33-7 have structures in which the variable regions of the CD33 antibody are linked with a polypeptide linker (SEQ ID NO: 48, SEQ ID NO: 50), and bind biparatopically to CD33, and have two Fc domains (FIG. 41b).

TABLE 68

| Name | Sequence | SEQ ID NO |
|---|---|---|
| 33-1 HC | EVQLVQSGAEVKKPGSSVKVSCKASGYTITDSNIHWVRQAPGQCLEWIGYIYPYNGGTD | 636 |
| | YNQKFKNRATLTVDNPTNTAYEMLSSLRSEDTAFYYCVNGNPWLAYWGQGTLVTVSSAS | |
| | TKGPSVFPLAPSSKSTSGGTAALGCLVKDYFPEPVTVSWNSGALTSGVHTFPAVLQSSG | |
| | LYSLSSVVTVPSSSLGTQTYICNVNHKPSNTKVDKKVEPKSCDKTHTCPPCPAPELLGG | |
| | PSVFLFPPKPKDTLMISRTPEVTCVVVDVSHEDPEVKFNWYVDGVEVHNAKTKPREEQY | |
| | NSTRYVVSVLTVLHQDWLNGKEYKCKVSNKALPAPIEKTISKAKGQPREPQVYTLPPCR | |
| | EEMTKNQVSLWCLVKGFYPSDIAVEWESNGQPENNYKTTPPVLDSDGSFFLYSKLTVDK | |
| | SRWQQGNVFSCSVMHEALHNHYTQKSLSLSPGK | |
| 33-1 LC | DIQLTQSPSTLSASVGDRVTITCRASESLDNYGIRFLTWFQQKPGKAPKLLMYAASNQG | 637 |
| | SGVPSRFSGSGSGTEFTLTISSLQPDDFATYYCQQTKEVPWSFGCGTKVEVKRTVAAPS | |
| | VFIFPPSDEQLKSGTASVVCLLNNFYPREAKVQWKVDNALQSGNSQESVTEQDSKDSTY | |
| | SLSSTLTLSKADYEKHKVVACEVTHQGLSSPVTKSFNRGECGGGGSGGGGSGGGGSEPK | |
| | SSDKTHTCPPCPAPELLGGPSVFLFPPKPKDTLMISRTPEVTCVVVDVSHEDPEVKFNW | |
| | YVDGVEVHNAKTKPREEQYNSTYRVVSVLTVLHQDWLNGKEYKCKVSNKALPAPIEKTI | |
| | SKAKGQPREPQVYTLPPCREEMTKNQVSLWCLVKGFYPSDIAVEWESNGQPENNYKTTP | |
| | PVLDSDGSFFLYSKLTVDKSRWQQGNVFSCSVMHEALHNHYTQKSLSLSPGK | |
| 33-2 HC | QVQLVQSGAEVKKPGSSVKVSCKASGYTFTDYNMHWVRQAPGQCLEWIGYIYPYNGGTG | 638 |
| | YNQKFNSKATITADESTNTAYMELSSLRSEDTAVYYCARGRPAMDYWGQGTLVTVSSAS | |
| | TKGPSVFPLAPSSKSTSGGTAALGCLVKDYFPEPVTVSWNSGALTSGVHTFPAVLQSSG | |
| | LYSLSSVVTVPSSSLGTQTYICNVNHKPSNTKVDKKVEPKSCDKTHTCPPCPAPELLGG | |
| | PSVFLFPPKPKDTLMISRTPEVTCVVVDVSHEDPEVKFNWYVDGVEVHNAKTKPREEQY | |
| | NSTRYVVSVLTVLHQDWLNGKEYKCKVSNKALPAPIEKTISKAKGQPREPQVYTLPPCR | |
| | EEMTKNQVSLWCLVKGFYPSDIAVEWESNGQPENNYKTTPPVLDSDGSFFLYSKLTVDK | |
| | SRWQQGNVFSCSVMHEALHNHYTQKSLSLSPGK | |
| 32-2 LC | DIQMTQSPSSLSASVGDRVTITCRASESVDNYGISFMNWFQQKPGKAPKLLIYAASNQG | 639 |
| | SGVPSRFSGSGSGTDFTLTISSLQPDDFATYYCQQSKEVPWTFGQCTKVEIKRTVAAPS | |
| | VFIFPPSDEQLKSGTASVVCLLNNFYPREAKVQWKVDNALQSGNSQESVTEQDSKDSTY | |
| | SLSSTLTLSKADYEKHKVYACEVTHQGLSSPVTKSFNRGECGGGGSGGGGSGGGGSEPK | |
| | SSDKTHTCPPCPAPELLGGPSVFLFPPKPKDTLMISRTPEVTCVVVDVSHEDPEVKFNW | |
| | YVDGVEVHNAKTKPREEQYNSTYRVVSVLTVLHQDWLNGKEYKCKVSNAKLPAPIEKTI | |
| | SKAKGQPREPQVYTLPPCREEMTKNQVSLWCLVKGFYPSDIAVEWESNGQPENNYKTTP | |
| | PVLDSDGSFFLYSKLTVDKSRWQQGNVFSCSVMHEALHNHYTQKSLSLSPGK | |
| 33-3 HC | QVQLQQPGAEVVKPGASVKMSCKASGYTFTSYYIHWIKQTPGQCLEWVGVIYPGNDDIS | 640 |
| | YNQKFQGKATLTADKSSTTAYMQLSSLTSEDSAVYYCAREVRLRYFDVWGQGTTVTVSS | |
| | ASTKGPSVFPLAPSSKSTSGGTAALGCLVKDYFPEPVTVSWNSGALTSGVHTFPAVLQS | |
| | SGLYSLSSVVTVPSSSLGTQTYICNVNHKPSNTKVDKKVEPKSCDKTHTCPPCPAPELL | |
| | GGPSVFLFPPKPKDTLMISRTPEVTCVVVDVSHEDPEVKFNWYVDGVEVHNAKTKPREE | |
| | QYNSTYRVVSVLTVLHQDWLNGKEYKCKVSNKALPAPIEKTISKAKGQPREPQVYTLPP | |
| | CREEMTKNQVSLWCLVKGFYPSDIAVEWESNGQPENNYKTTPPVLDSDGSFFLYSKLTV | |
| | DKSRWQQGNVFSCSVMHEALHNHYTQKSLSLSPGK | |
| 33-3 LC | EIVLTQSPGSLAVSPGERVTMSCKSSQSVFFSSSQKNYLAWYQQIPGQSPRLLIYWAST | 641 |
| | RESGVPDRFTGSGSGTDFTLTISSVQPEDLAIYYCHQYLSSRTFGCGTKLEIKRTVAAP | |
| | SVFIFPPSDEQLKSGTASVVCLLNNFYPREAKVQWKVDNALQSGNSQESVTEQDSKDST | |
| | YSLSSTLTLSKADYEKHKVYACEVTHQGLSSPVTKSFNRGECGGGGSGGGGSGGGGSEP | |
| | KSSDKTHTCPPCPAPELLGGPSVFLFPPKPKDTLMISRTPEVTCVVVDVSHEDPEVKFN | |
| | WYVDGVEVHNAKTKPREEQYNSTYRVVSVLTVLHQDWLNGKEYKCKVSNKALPAPIEKT | |
| | ISKAKGQPREPQVYTLPPCREEMTKNQVSLWCLVKGFYPSDIAVEWESNGQPENNYKTT | |
| | PPVLDSDGSFFLYSKLTVDKSRWQQGNVFSCSVMHEALHNHYTQKSLSLSPGK | |
| 33-4 HC | EVQLVQSGAEVKKPGSSVKVSCKASGYTITDSNIHWVRQAPGQSLEWIGYIYPYNGGTD | 642 |
| | YNQKFKNRATLTVDNPTNTAYMELSSLRSEDTAFYYCVNGNPWLAYWGQGTLVTVSSAS | |
| | TKGPSVFPLAPQVQLVQSGAEVKKPGSSVKVSCKASGYTFTDYNMHWVRQAPGQCLEWI | |
| | GYIYPYNGGTGYNQKFKSKATITADESTNTAYMELSSLRSEDTAVYYCARGRPAMDYWG | |
| | QGTLVTVSSASTKGPSVFPLAPSSKSTSGGTAALGCLVKDYFPEPVTVSWNSGALTSGV | |
| | HTFPAVLQSSGLYSLSSVVTVPSSSLGTQTYICNVNHKPSNTKVDKKVEPKSCDKTHTC | |
| | PPCPAPELLGGPSVFLFPPKPKDTLMISRTPEVTCVVVDVSHEDPEVKFNWYVDGVEVH | |
| | NAKTKPREEQYNSTRYVVSVLTVLHQDWLNGKEYCKCVSNKALPAPIEKTISKAKGQPR | |
| | EPQVYTLPPCREEMTKNQVSLWCLVKGFYPSDIAVEWESNGQPENNYKTTPPVLDSDGS | |
| | FFLYSKLTVDKSRWQQGNVFSCSVMHEALHNHYTQKSLSLSPGK | |
| 33-4 LC | DIQLTQSPSTLSASVGDRVTITCRASESLDNYGIRFLTWFQQKPGKAPKLLMYAASNQG | 643 |
| | SGVPSRFSGSGSGTEFTLTISSLQPDDFATYYCQQTKEVPWSFGQGTKVEVKRTVAAPS | |
| | VFIFPPDIQMTQSPSSLSASVGDRVTITCRASESVDNYGISFMNWFQQKPGAKPKLLIY | |
| | AASNQGSGVPSRFSGSGSGTDFTLTISSLQPDDFATYYCQQSKEVPWTFGCGTKVEIKR | |
| | TVAAPSVFIFPPSDEQLKSGTASVVCLLNNFYPREAKVQWKVDNALQSGNSQESVTEQD | |
| | SKDSTYSLSSTLTLSKADYEKHKVYACEVTHQGLSSPVTKSFNRGECGGGGSGGGGSGG | |
| | GGSEPKSSDKTHTCPPCPAPELLGGPSVFLFPPKPKDTLMISRTPEVTCVVVDVSHEDP | |
| | EVKFNWYVDGVEVHNAKTKPREEQYNSTYRVVSVLTVLHQDWLNGKEYKCKVSNKALPA | |
| | PIEKTISKAKGQPREPQVYTLPPCREEMTKNQVSLWCLVKGFYPSDIAVEWESNGQPEN | |
| | NYKTIPPVLDSDGSFFLYSKLTVDKSRWQQGNVFSCSVMHEALHNHYTQKSLSLSPGK | |
| 33-5 HC | QVQLQQPGAEVKKPGASVKMSCKASGYTFTSYYIHWIKQTPGQGLEWVGVIYPGNDDIS | 644 |
| | YNQKFQGKATLTADKSSTTAYMQLSSLTSEDSAVYYCAREVRLRYFDVWGQGTTVTVSS | |
| | ASKTGPSVFPLAPQVQLVQSGAEVKKPGSSVKVSCKASGYTFTDYNMHWVRQAPGQCLE | |
| | WIGYIYPYNGGTGYNQKFKSKATITADESTNTAYMELSSLRSEDTAVYYCARGRPAMDY | |
| | WGQGTLVTVSSASTKGPSVFPLAPSSKSTSGGTAALGCLVKDYFPEPVTVSWNSGALTS | |
| | GVHTFPAVLQSSGLYSLSSVVTVPSSSLGTQTYICNVNHKPSNTKVDKKVEPKSCDKTH | |
| | TCPPCPAPELLGGPSVFLFPPKPKDTLMISRTPEVTCVVVDVSHEDPEVKFNWYVDGVE | |
| | VHNAKTKPREEQYNSTYRVVSVLTVLHQDWLNGKEYKCKVSNKALPAPIEKTISKAKGQ | |
| | PREPQVYTLPPCREEMTKNQVSLWCLVKGFYPSDIAVEWESNGQPENNYKTTPPVLDSD | |
| | GSFFLYSKLTVDKSRWQQGNVFSCSVMHEALHNHYTQKSLSLSPGK | |
| 33-5 LC | EIVLTQSPGSLAVSPGERVTMSCKSSQSVFFSSSQKNYLAWYQQIFGQSPRLLIYWAST | 645 |
| | RESGVPDRFTGSGSGTDFTLTISSVQPEDLAIYYCHQYLSSRTFGQGTKLEIKRTVAAP | |
| | SVFIFPPDIQMTQSPSSLSASVGDRVTITCRASESVDNYGISFMNWFQQKPGKAPKLLI | |
| | YAASNQGSGVPSRFSGSGSGTDFTLTISSLQPDDFATYYCQQSKEVPWTFGCGTKVEIK | |
| | RTVAAPSVFIFPPSDEQLKSGTASVVCLLNNFYPREAKVQWKVDNALQSGNSQESVTEQ | |
| | DSKDSTYSLSSTLTLSKADYEKHKVYACEVTHQGLSSPVTKSFNRGECGGGGSGGGGSG | |
| | GGGSEPKSSDKTHTCPPCPAPELLGGPSVFLFPPKPKDTLMISRTPEVTCVVVDVSHED | |
| | PEVKFNWYVDGVEVHNAKTKPREEQYNSTYRVVSVLTVLHQDWLNGKEYKCKVSNKALP | |
| | APIEKTISKAKGQPREPQVYTLPPCREEMTKNQVSLWCLVKGFYPSDIAVEWESNGQPE | |
| | NNYKTTPPVLDSDGSFFLYSKLTVDKSRWQQGNVFSCSVMHEALHNHYTQKSLSLSPGK | |
| 33-6 HC | QVQLVQSGAEVKKPGSSVKVSCKASGYTFTDYNMHWVRQAPGQGLEWIGYIYPYNGGTG | 646 |
| | YNQKFKSKATITADESTNTAYMELSSLRSEDTAVYYCARGRPAMDYWGQGTLVTVSSAS | |
| | TKGPSVFPLAPEVQLVQSGAEVKKPGSSVKVSCKASGYTITDSNIHWVRQAPGQCLEWI | |
| | GYIYPYNGGTDYNQKFKNRATLTVDNPTNTAYMELSSLRSEDTAFYYCVNGNPWLAYWG | |
| | QGTLVTVSSASTKGPSVFPLAPSSKSTSGGTAALGCLVKDYFPEPVTVSWNSGALTSGV | |
| | HTFPAVLQSSGLYSLSSVVTVPSSSLGTQTYICNVNHKPSNTKVDKKVEPKSCDKTHTC | |
| | PPCPAPELLGGPSVFLFPPKPKDTLMISRTPEVTCVVVDVSHEDPEVKFNWYVDGVEVH | |
| | NAKTKPREEQYNSTYRVVSVLTVLHQDWLNGKEYKCKVSNKALPAPIEKTISKAKGQPR | |
| | EPQVYTLPPCREEMTKNQVSLWCLVKGFYPSDIAVEWESNGQPENNYKTTPPVLDSDGS | |
| | FFLYSKLTVDKSRWQQGNVFSCSVMHEALHNHYTQKSLSLSPGK | |
| 33-6 LC | DIQMTQSPSSLSASVGDRVTITCRASESVDNYGISFMNWFQQKPGKAPKLLIYAASNQG | 647 |
| | SGVPSRFSGSGSGTDFTLTISSLQPDDFATYYCQQSKEVPWTFGQGTKVEIKRTVAAPS | |
| | VFIFPPSDEQLKSGTASVVCLLNNFYPREAKVQWKVDNALQSGNSQESVTEQDSKDSTY | |
| | SLSSTLTLSKADYEKHKVYACEVTHQGLSSPVTKSFNRGECGGGGSGGGGSGGGGSEPK | |
| | SSDKTHTCPPCPAPELLGGPSVFLFPPKPKDTLMISRTPEVTCVVVDVSHEDPEVKFNW | |
| | YVDGVEVHNAKTKPREEQYNSTYRVVSVLTVLHQDWLNGKEYKCKVSNKALPAPIEKTI | |
| | SKAKGQPREPQVYTLPPCREEMTKNQVSLWCLVKGFYPSDIAVEWESNGQPENNYKTTP | |
| | PVLDSDGSFFLYSKLTVDKSRWQQGNVFSCSVMHEALHNHYTQKSLSLSPGK | |
| 33-7 HC | QVQLVQSGAEVKKPGSSVTVSCKASGYTFTDYNMHWVRQAPGQGLEWIGYIYPYNGGTG | 648 |
| | YNQKFKSKATITADESTNTAYMELSSLRSEDTAVYYCARGRPAMDYWGQGTLVTVSSAS | |
| | TKGPSVFPLAPQVQLQQPGAEVKKPGASVKMSCKASGYTFTSYYIHWIKQTPGQGLEWV | |
| | GVIYPGNDDISYNQKFQGKATLTADKSSTTAYMQLSSLTSEDSAVYYCAREVRLRYFDV | |
| | WGQGTTVTVSSASTKGPSVFPLAPSSKSTSGGTAALGCLVKDYFPEPVTVSWNSGALTS | |
| | GVHTFPAVLQSSGLYSLSSVVTVPSSSLGTYTYICNVNHKPSNTKVDKKVEPKSCDKTH | |
| | TCPPCPAPELLGGPSVFLFPPKPKDTLMISRTPEVTCVVVDVSHEDPEVKFNWYVDGVE | |
| | VHNAKTKPREEQYNSTYRVVSVLTVLHQDWLNGKEYKCKVSNKALPAPIEKTISKAKGQ | |
| | PREPQVYTLPPCREEMTKNQVSLWCLVKGFYPSDIAVEWESNGQPENNYKTTPPVLDSD | |
| | GSFFLYSKLTVDKSRWQQGNVFSCSVMHEALHNHYTQKSLSLSPGK | |
| 33-7 LC | DIQMTQSPSSLSASVGDRVTITCRASESVDNYGISFMNWFQQKPGKAPKLLIYAASNQG | 649 |
| | SGVPSRFSGSGSGTDFTLTISSLQPDDFATYYCQQSKEVPWTFGQGTKVEIKRTVAAPS | |
| | VFIFPPEIVLTQSPGSLAVSPGERVTMSCKSSQSVFFSSSQKNYLAWYQQIPGQSPRLL | |
| | IYWASTRESGVPDRFTGSGSGTDFTLTISSVQPEDLAIYYCHQYLSSRTFGCGTKLEIK | |
| | RTVAAPSVFIFPPSDEQLKSGTASVVCLLNNFYPREAKVQWKVDNALQSGNSQESVTEQ | |
| | DSKDSTYSLSSTLTLSKADYEKHKVYACEVTHQGLSSPVTKSFNRGECGGGGSGGGGSG | |
| | GGGSEPKSSDKTHTCPPCPAPELLGGPSVFLFPPKPKDTLMISRTPEVTCVVVDVSHED | |
| | PEVKFNWYVDGVEVHNAKTKPREEQYNSTYRVVSVLTVLHQDWLNGKEYKCKVSNKALP | |
| | APEIKTISKAKGQPREPQVYTLPPCREEMTKNQVSLWCLVKGFYPSDIAVEWESNGQPE | |
| | NNYKTTPPVLDSDGSFFLYSKLTVDKSRWQQGNVFSCSVMHEALHNHYTQKSLSLSPGK | |

TABLE 69

| Name | Sequence | SEQ ID NO |
|---|---|---|
| 33-1 HC | GAGGTTCAGTTGGTTCAGTCAGGAGCAGAGGTCAAAAAACCTGGAAGCTCTGTCAAAGT | 650 |
| | TAGTTGTAAGGCCAGTGGATACACCATAACCGATTCAAATATACATTGGGTTAGGCAAG | |
| | CACCAGGACAGTGCTTGGAATGGATCGGGTACATCTATCCATATAATGGGGGCACCGAT | |
| | TACAACCAAAAGTTTAAGAATCGCGCCACACTCACTGTTGATAATCCAACCAATACAGC | |
| | ATACATGGAGTTGAGCAGTCTTCGGTCCGAGGACACTGCTTTTTACTATTGTGTGAACG | |
| | GTAACCCATGGTTGGCCTATTGGGGCCAAGGTACACTTGTAACAGTTTCATCTGCTAGC | |
| | ACCAAAGGACCTAGTGTTTTTCCTCTTGCCCCTTCCTCAAAGTCTACCTCTGGGGGGAC | |
| | AGCCGCTCTGGGCTGCCTGGTCAAGGATTATTTCCCAGAGCCTGTCACTGTCAGTTGGA | |
| | ACTCTGGAGCCTTGACTTCTGGTGTTCATACATTTCCTGCTGTCCTTCAAAGCAGCGGC | |
| | TTGTACTCATTGTCTTCTGTTGTGACAGTACCCTCAAGCAGCCTCGGCACTCAGACATA | |
| | CATCTGCAATGTCAACCACAAACCCTCAAATACAAAGGTAGATAAAAAAGTCGAACCAA | |
| | AGTCTTGTGACAAAACTCACACGTGCCCACCGTGCCCAGCACCTGAACTCCTGGGGGGA | |
| | CCGTCAGTCTTCCTCTTCCCCCCAAAACCCAAGGACACCCTCATGATCTCCCGGACCCC | |
| | TGAGGTCACATGCGTGGTGGTGGACGTGAGCCACGAAGACCCTGAGGTCAAGTTCAACT | |
| | GGTACGTGGACGGCGTGGAGGTGCATAATGCCAAGACAAAGCCGCGGGAGGAGCAGTAC | |
| | AACAGCACGTACCGTGTGGTCAGCGTCCTCACCGTCCTGCACCAGGACTGGCTGAATGG | |
| | CAAGGAGTACAAGTGCAAGGTCTCCAACAAAGCCCTCCCAGCCCCCATCGAGAAAACCA | |
| | TCTCCAAAGCCAAAGGGCAGCCCCGAGAACCACAGGTGTACACCCTGCCCCCATGCCGG | |
| | GAGGAGATGACCAAGAACCAGGTCAGCCTGTGGTGCCTGGTCAAAGGCTTCTATCCCAG | |
| | CGACATCGCCGTGGAGTGGGAGAGCAATGGGCAGCCGGAGAACAACTACAAGACCACGC | |
| | CTCCCGTGCTGGACTCCGACGGCTCCTTCTTCCTCTACAGCAAGCTCACCGTGGACAAG | |
| | AGCAGGTGGCAGCAGGGGAACGTCTTCTCATGCTCCGTGATGCATGAGGCTCTGCACAA | |
| | CCACTACACGCAGAAGAGCCTCTCCCTGTCTCCGGGTAAA | |
| 33-1 LC | GATATACAACTGACTCAGAGTCCCAGCACTCTCAGTGCAAGTGTAGGCGATAGAGTAAC | 651 |
| | TATAACCTGTCGCGCCTCAGAATCTCTTGATAATTATGGGATCCGATTTCTTACTTGGT | |
| | TTCAGCAAAAGCCTGGTAAAGCTCCTAAATTGCTCATGTATGCCGCCAGTAATCAGGGT | |
| | TCAGGAGTTCCTAGTCGTTTCTCTGGGTCAGGAAGCGGCACAGAATTTACCCTTACAAT | |
| | TTCCAGCCTCCAGCCCGACGATTTCGCCACTTACTATTGCCAACAAACTAAAGAGGTTC | |
| | CTTGGAGTTTTGGGTGTGGCACCAAGGTAGAAGTAAAACGTACGGTGGCAGCTCCCAGC | |
| | GTTTTTATCTTTCCCCCATCCGACGAGCAGCTCAAGAGTGGCACTGCCTCTGTAGTTTG | |
| | TTTGCTGAATAACTTCTATCCACGTGAAGCAAAAGTACAGTGGAAGGTCGATAATGCCC | |
| | TTCAGAGCGGTAACAGCCAAGAAAGTGTTACCGAGCAAGATTCCAAAGATTCCACTTAC | |
| | AGTCTGTCCAGCACATTGACACTGAGTAAGGCTGATTACGAAAAACACAAGGTGTACGC | |
| | ATGCGAGGTGACACACCAAGGTCTTTCATCTCCTGTAACTAAGAGCTTTAACCGGGGAG | |
| | AATGTGGTGGTGGGGGCAGCGGGGGCGGAGGTAGTGGAGGCGGCGGTAGTGAACCAAAG | |
| | AGTAGTGACAAAACTCACACGTGCCCACCGTGCCCAGCACCTGAACTCCTGGGGGGACC | |
| | GTCAGTCTTCCTCTTCCCCCCAAAACCCAAGGACACCCTCATGATCTCCCGGACCCCTG | |
| | AGGTCACATGCGTGGTGGTGGACGTGAGCCACGAAGACCCTGAGGTCAAGTTCAACTGG | |
| | TACGTGGACGGCGTGGAGGTGCATAATGCCAAGACAAAGCCGCGGGAGGAGCAGTACAA | |
| | CAGCACGTACCGTGTGGTCAGCGTCCTCACCGTCCTGCACCAGGACTGGCTGAATGGCA | |
| | AGGAGTACAAGTGCAAGGTCTCCAACAAAGCCCTCCCAGCCCCCATCGAGAAAACCATC | |
| | TCCAAAGCCAAAGGGCAGCCCCGAGAACCACAGGTGTACACCCTGCCCCCATGCCGGGA | |
| | GGAGATGACCAAGAACCAGGTCAGCCTGTGGTGCCTGGTCAAAGGCTTCTATCCCAGCG | |
| | ACATCGCCGTGGAGTGGGAGAGCAATGGGCAGCCGGAGAACAACTACAAGACCACGCCT | |
| | CCCGTGCTGGACTCCGACGGCTCCTTCTTCCTCTACAGCAAGCTCACCGTGGACAAGAG | |
| | CAGGTGGCAGCAGGGGAACGTCTTCTCATGCTCCGTGATGCATGAGGCTCTGCACAACC | |
| | ACTACACGCAGAAGAGCCTCTCCCTGTCTCCGGGTAAA | |
| 33-2 HC | CAGGTACAGCTTGTGCAATCTGGAGCTGAGGTCAAAAAACCAGGAAGTTCTGTAAAGGT | 652 |
| | GTCTTGTAAGGCATCTGGTTACACATTTACCGATTACAACATGCATTGGGTACGTCAAG | |
| | CCCCTGGCCAGTGCCTGGAATGGATCGGATATATATACCCCTACAACGGTGGAACAGGT | |
| | TACAACCAAAAATTCAAAAGCAAGGCTACTATCACTGCCGACGAGAGCACTAACACCGC | |
| | TTACATGGAACTGTCTTCCTTGCGTTCAGAAGACACTGCCGTGTATTATTGTGCTCGGG | |
| | GGCGACCCGCAATGGACTATTGGGGCCAAGGTACATTGGTGACTGTCAGTTCCGCTAGC | |
| | ACCAAAGGACCTAGTGTTTTTCCTCTTGCCCCTTCCTCAAAGTCTACCTCTGGGGGGAC | |
| | AGCCGCTCTGGGCTGCCTGGTCAAGGATTATTTCCCAGAGCCTGTCACTGTCAGTTGGA | |
| | ACTCTGGAGCCTTGACTTCTGGTGTTCATACATTTCCTGCTGTCCTTCAAAGCAGCGGC | |
| | TTGTACTCATTGTCTTCTGTTGTGACAGTACCCTCAAGCAGCCTCGGCACTCAGACATA | |
| | CATCTGCAATGTCAACCACAAACCCTCAAATACAAAGGTAGATAAAAAAGTCGAACCAA | |
| | AGTCTTGTGACAAAACTCACACGTGCCCACCGTGCCCAGCACCTGAACTCCTGGGGGGA | |
| | CCGTCAGTCTTCCTCTTCCCCCCAAAACCCAAGGACACCCTCATGATCTCCCGGACCCC | |
| | TGAGGTCACATGCGTGGTGGTGGACGTGAGCCACGAAGACCCTGAGGTCAAGTTCAACT | |
| | GGTACGTGGACGGCGTGGAGGTGCATAATGCCAAGACAAAGCCGCGGGAGGAGCAGTAC | |
| | AACAGCACGTACCGTGTGGTCAGCGTCCTCACCGTCCTGCACCAGGACTGGCTGAATGG | |
| | CAAGGAGTACAAGTGCAAGGTCTCCAACAAAGCCCTCCCAGCCCCCATCGAGAAAACCA | |
| | TCTCCAAAGCCAAAGGGCAGCCCCGAGAACCACAGGTGTACACCCTGCCCCCATGCCGG | |
| | GAGGAGATGACCAAGAACCAGGTCAGCCTGTGGTGCCTGGTCAAAGGCTTCTATCCCAG | |
| | CGACATCGCCGTGGAGTGGGAGAGCAATGGGCAGCCGGAGAACAACTACAAGACCACGC | |
| | CTCCCGTGCTGGACTCCGACGGCTCCTTCTTCCTCTACAGCAAGCTCACCGTGGACAAG | |
| | AGCAGGTGGCAGCAGGGGAACGTCTTCTCATGCTCCGTGATGCATGAGGCTCTGCACAA | |
| | CCACTACACGCAGAAGAGCCTCTCCCTGTCTCCGGGTAAA | |
| 33-2 LC | GACATCCAAATGACACAGTCCCCTAGCTCACTTTCAGCAAGCGTGGGGGACCGAGTTAC | 653 |
| | TATCACATGCCGCGCAAGTGAGTCTGTGGACAACTATGGAATATCATTCATGAACTGGT | |
| | TCCAGCAGAAACCTGGGAAAGCACCCAAGCTGCTTATCTACGCAGCAAGTAATCAGGGT | |
| | AGTGGCGTCCCTTCTCGATTCAGTGGGAGCGGTAGCGGCACCGACTTCACCCTTACCAT | |
| | CTCATCACTTCAACCCGATGATTTTGCTACCTACTATTGCCAGCAATCCAAGGAAGTTC | |
| | CTTGGACCTTCGGGTGTGGGACAAAGGTAGAGATTAAACGTACGGTGGCAGCTCCCAGC | |
| | GTTTTTATCTTTCCCCCATCCGACGAGCAGCTCAAGAGTGGCACTGCCTCTGTAGTTTG | |
| | TTTGCTGAATAACTTCTATCCACGTGAAGCAAAAGTACAGTGGAAGGTCGATAATGCCC | |
| | TTCAGAGCGGTAACAGCCAAGAAAGTGTTACCGAGCAAGATTCCAAAGATTCCACTTAC | |
| | AGTCTGTCCAGCACATTGACACTGAGTAAGGCTGATTACGAAAAACACAAGGTGTACGC | |
| | ATGCGAGGTGACACACCAAGGTCTTTCATCTCCTGTAACTAAGAGCTTTAACCGGGGAG | |
| | AATGTGGTGGTGGGGGCAGCGGGGGCGGAGGTAGTGGAGGCGGCGGTAGTGAACCAAAG | |
| | AGTAGTGACAAAACTCACACGTGCCCACCGTGCCCAGCACCTGAACTCCTGGGGGGACC | |
| | GTCAGTCTTCCTCTTCCCCCCAAAACCCAAGGACACCCTCATGATCTCCCGGACCCCTG | |
| | AGGTCACATGCGTGGTGGTGGACGTGAGCCACGAAGACCCTGAGGTCAAGTTCAACTGG | |
| | TACGTGGACGGCGTGGAGGTGCATAATGCCAAGACAAAGCCGCGGGAGGAGCAGTACAA | |
| | CAGCACGTACCGTGTGGTCAGCGTCCTCACCGTCCTGCACCAGGACTGGCTGAATGGCA | |
| | AGGAGTACAAGTGCAAGGTCTCCAACAAAGCCCTCCCAGCCCCCATCGAGAAAACCATC | |
| | TCCAAAGCCAAAGGGCAGCCCCGAGAACCACAGGTGTACACCCTGCCCCCATGCCGGGA | |
| | GGAGATGACCAAGAACCAGGTCAGCCTGTGGTGCCTGGTCAAAGGCTTCTATCCCAGCG | |
| | ACATCGCCGTGGAGTGGGAGAGCAATGGGCAGCCGGAGAACAACTACAAGACCACGCCT | |
| | CCCGTGCTGGACTCCGACGGCTCCTTCTTCCTCTACAGCAAGCTCACCGTGGACAAGAG | |
| | CAGGTGGCAGCAGGGGAACGTCTTCTCATGCTCCGTGATGCATGAGGCTCTGCACAACC | |
| | ACTACACGCAGAAGAGCCTCTCCCTGTCTCCGGGTAAA | |
| 33-3 HC | CAAGTCCAACTTCAGCAGCCTGGAGCTGAGGTAGTGAAACCCGGCGCATCTGTAAAAAT | 654 |
| | GAGCTGCAAAGCATCAGGTTACACATTTACATCCTACTACATCCATTGGATCAAGCAAA | |
| | CACCAGGCCAATGTCTTGAGTGGGTTGGCGTCATTTACCCAGGAAACGATGATATATCT | |
| | TACAATCAGAAATTTCAAGGGAAAGCCACACTTACAGCCGACAAGAGTTCCACAACTGC | |
| | ATATATGCAACTCTCCTCCCTGACATCTGAAGACAGTGCCGTATACTATTGTGCTCGTG | |
| | AAGTCAGGCTCAGATACTTTGACGTGTGGGGTCAAGGCACAACCGTCACCGTCAGTAGC | |
| | GCTAGCACCAAAGGACCTAGTGTTTTTCCTCTTGCCCCTTCCTCAAAGTCTACCTCTGG | |
| | GGGGACAGCCGCTCTGGGCTGCCTGGTCAAGGATTATTTCCCAGAGCCTGTCACTGTCA | |
| | GTTGGAACTCTGGAGCCTTGACTTCTGGTGTTCATACATTTCCTGCTGTCCTTCAAAGC | |
| | AGCGGCTTGTACTCATTGTCTTCTGTTGTGACAGTACCCTCAAGCAGCCTCGGCACTCA | |
| | GACATACATCTGCAATGTCAACCACAAACCCTCAAATACAAAGGTAGATAAAAAAGTCG | |
| | AACCAAAGTCTTGTGACAAAACTCACACGTGCCCACCGTGCCCAGCACCTGAACTCCTG | |
| | GGGGGACCGTCAGTCTTCCTCTTCCCCCCAAAACCCAAGGACACCCTCATGATCTCCCG | |
| | GACCCCTGAGGTCACATGCGTGGTGGTGGACGTGAGCCACGAAGACCCTGAGGTCAAGT | |
| | TCAACTGGTACGTGGACGGCGTGGAGGTGCATAATGCCAAGACAAAGCCGCGGGAGGAG | |
| | CAGTACAACAGCACGTACCGTGTGGTCAGCGTCCTCACCGTCCTGCACCAGGACTGGCT | |
| | GAATGGCAAGGAGTACAAGTGCAAGGTCTCCAACAAAGCCCTCCCAGCCCCCATCGAGA | |
| | AAACCATCTCCAAAGCCAAAGGGCAGCCCCGAGAACCACAGGTGTACACCCTGCCCCCA | |
| | TGCCGGGAGGAGATGACCAAGAACCAGGTCAGCCTGTGGTGCCTGGTCAAAGGCTTCTA | |
| | TCCCAGCGACATCGCCGTGGAGTGGGAGAGCAATGGGCAGCCGGAGAACAACTACAAGA | |
| | CCACGCCTCCCGTGCTGGACTCCGACGGCTCCTTCTTCCTCTACAGCAAGCTCACCGTG | |
| | GACAAGAGCAGGTGGCAGCAGGGGAACGTCTTCTCATGCTCCGTGATGCATGAGGCTCT | |
| | GCACAACCACTACACGCAGAAGAGCCTCTCCCTGTCTCCGGGTAAA | |
| 33-3 LC | GAGATAGTCCTCACCCAATCACCAGGTAGTCTGGCTGTTAGCCCAGGTGAGCGAGTTAC | 655 |
| | TATGTCTTGCAAGTCCTCTCAATCTGTGTTCTTTTCATCAAGTCAGAAGAATTATCTTG | |
| | CCTGGTATCAGCAGATTCCTGGTCAATCTCCCCGACTGCTTATTTACTGGGCTTCAACT | |
| | CGGGAGTCAGGGGTTCCCGACCGATTCACAGGGTCTGGGTCAGGAACTGACTTTACCCT | |
| | TACTATCAGCTCTGTGCAGCCTGAAGACCTCGCAATATATTATTGTCATCAGTACCTCT | |
| | CTTCTCGCACTTTTGGATGTGGCACCAAATTGGAGATTAAGCGTACGGTGGCAGCTCCC | |
| | AGCGTTTTTATCTTTCCCCCATCCGACGAGCAGCTCAAGAGTGGCACTGCCTCTGTAGT | |
| | TTGTTTGCTGAATAACTTCTATCCACGTGAAGCAAAAGTACAGTGGAAGGTCGATAATG | |
| | CCCTTCAGAGCGGTAACAGCCAAGAAAGTGTTACCGAGCAAGATTCCAAAGATTCCACT | |
| | TACAGTCTGTCCAGCACATTGACACTGAGTAAGGCTGATTACGAAAAACACAAGGTGTA | |
| | CGCATGCGAGGTGACACACCAAGGTCTTTCATCTCCTGTAACTAAGAGCTTTAACCGGG | |
| | GAGAATGTGGTGGTGGGGGCAGCGGGGGCGGAGGTAGTGGAGGCGGCGGTAGTGAACCA | |
| | AAGAGTAGTGACAAAACTCACACGTGCCCACCGTGCCCAGCACCTGAACTCCTGGGGGG | |
| | ACCGTCAGTCTTCCTCTTCCCCCCAAAACCCAAGGACACCCTCATGATCTCCCGGACCC | |
| | CTGAGGTCACATGCGTGGTGGTGGACGTGAGCCACGAAGACCCTGAGGTCAAGTTCAAC | |
| | TGGTACGTGGACGGCGTGGAGGTGCATAATGCCAAGACAAAGCCGCGGGAGGAGCAGTA | |
| | CAACAGCACGTACCGTGTGGTCAGCGTCCTCACCGTCCTGCACCAGGACTGGCTGAATG | |
| | GCAAGGAGTACAAGTGCAAGGTCTCCAACAAAGCCCTCCCAGCCCCCATCGAGAAAACC | |
| | ATCTCCAAAGCCAAAGGGCAGCCCCGAGAACCACAGGTGTACACCCTGCCCCCATGCCG | |
| | GGAGGAGATGACCAAGAACCAGGTCAGCCTGTGGTGCCTGGTCAAAGGCTTCTATCCCA | |
| | GCGACATCGCCGTGGAGTGGGAGAGCAATGGGCAGCCGGAGAACAACTACAAGACCACG | |
| | CCTCCCGTGCTGGACTCCGACGGCTCCTTCTTCCTCTACAGCAAGCTCACCGTGGACAA | |
| | GAGCAGGTGGCAGCAGGGGAACGTCTTCTCATGCTCCGTGATGCATGAGGCTCTGCACA | |
| | ACCACTACACGCAGAAGAGCCTCTCCCTGTCTCCGGGTAAA | |
| 33-4 HC | GAGGTTCAGTTGGTTCAGTCAGGAGCAGAGGTCAAAAAACCTGGAAGCTCTGTCAAAGT | 656 |
| | TAGTTGTAAGGCCAGTGGATACACCATAACCGATTCAAATATACATTGGGTTAGGCAAG | |
| | CACCAGGCACAGTCTTGGAATGGATCGGGTACATCTATCCATATAATGGGGGCACCGAT | |
| | TACAACCAAAAGTTTAAGAATCGCGCCACACTCACTGTTGATAATCCAACCAATACAGC | |
| | ATACATGGAGTTGAGCAGTCTTCGGTCCGAGGACACTGCTTTTTACTATTGTGTGAACG | |
| | GTAACCCATGGTTGGCCTATTGGGGCCAAGGTACACTTGTAACAGTTTCATCCGCTAGC | |
| | ACCAAAGGACCTAGTGTTTTTCCTCTTGCCCCTCAGGTACAGCTTGTGCAATCTGGAGC | |
| | TGAGGTCAAAAAACCAGGAAGTTCTGTAAAGGTGTCTTGTAAGGCATCTGGTTACACAT | |
| | TTACCGATTACAACATGCATTGGGTACGTCAAGCCCCTGGCCAGTGCCTGGAATGGATC | |
| | GGATATATATACCCCTACAACGGTGGAACAGGTTACAACCAAAAATTCAAAAGCAAGGC | |
| | TACTATCACTGCCGACGAGAGCACTAACACCGCTTACATGGAACTGTCTTCCTTGCGTT | |
| | CAGAAGACACTGCCGTGTATTATTGTGCTCGGGGGCGACCCGCAATGGACTATTGGGGC | |
| | CAAGGTACATTGGTGACTGTCAGTTCCGCTAGCACCAAAGGACCTAGTGTTTTTCCTCT | |
| | TGCCCCTTCCTCAAAGTCTACCTCTGGGGGGACAGCCGCTCTGGGCTGCCTGGTCAAGG | |
| | ATTATTTCCCAGAGCCTGTCACTGTCAGTTGGAACTCTGGAGCCTTGACTTCTGGTGTT | |
| | CATACATTTCCTGCTGTCCTTCAAAGCAGCGGCTTGTACTCATTGTCTTCTGTTGTGAC | |
| | AGTACCCTCAAGCAGCCTCGGCACTCAGACATACATCTGCAATGTCAACCACAAACCCT | |
| | CAAATACAAAGGTAGATAAAAAAGTCGAACCAAAGTCTTGTGACAAAACTCACACGTGC | |
| | CCACCGTGCCCAGCACCTGAACTCCTGGGGGGACCGTCAGTCTTCCTCTTCCCCCCAAA | |
| | ACCCAAGGACACCCTCATGATCTCCCGGACCCCTGAGGTCACATGCGTGGTGGTGGACG | |
| | TGAGCCACGAAGACCCTGAGGTCAAGTTCAACTGGTACGTGGACGGCGTGGAGGTGCAT | |
| | AATGCCAAGACAAAGCCGCGGGAGGAGCAGTACAACAGCACGTACCGTGTGGTCAGCGT | |
| | CCTCACCGTCCTGCACCAGGACTGGCTGAATGGCAAGGAGTACAAGTGCAAGGTCTCCA | |
| | ACAAAGCCCTCCCAGCCCCCATCGAGAAAACCATCTCCAAAGCCAAAGGGCAGCCCCGA | |
| | GAACCACAGGTGTACACCCTGCCCCCATGCCGGGAGGAGATGACCAAGAACCAGGTCAG | |
| | CCTGTGGTGCCTGGTCAAAGGCTTCTATCCCAGCGACATCGCCGTGGAGTGGGAGAGCA | |
| | ATGGGCAGCCGGAGAACAACTACAAGACCACGCCTCCCGTGCTGGACTCCGACGGCTCC | |
| | TTCTTCCTCTACAGCAAGCTCACCGTGGACAAGAGCAGGTGGCAGCAGGGGAACGTCTT | |
| | CTCATGCTCCGTGATGCATGAGGCTCTGCACAACCACTACACGCAGAAGAGCCTCTCCC | |
| | TGTCTCCGGGTAAA | |
| 33-4 LC | GATATACAACTGACTCAGAGTCCCAGCACTCTCAGTGCAAGTGTAGGCGATAGAGTAAC | 657 |
| | TATAACCTGTCGCGCCTCAGAATCTCTTGATAATTATGGGATCCGATTTCTTACTTGGT | |
| | TTCAGCAAAAGCCTGGTAAAGCTCCTAAATTGCTCATGTATGCCGCCAGTAATCAGGGT | |
| | TCAGGAGTTCCTAGTCGTTTCTCTGGGTCAGGAAGCGGCACAGAATTTACCCTTACAAT | |
| | TTCCAGCCTCCAGCCCGACGATTTCGCCACTTACTATTGCCAACAAACTAAAGAGGTTC | |
| | CTTGGAGTTTTGGGCAAGGCACCAAGGTAGAAGTAAAACGTACGGTGGCCGCTCCCTCC | |
| | GTTTTTATCTTTCCCCCAGACATCCAAATGACACAGTCCCCTAGCTCACTTTCAGCAAG | |
| | CGTGGGGGACCGAGTTACTATCACATGCCGCGCAAGTGAGTCTGTGGACAACTATGGAA | |
| | TATCATTCATGAACTGGTTCCAGCAGAAACCTGGGAAAGCACCCAAGCTGCTTATCTAC | |
| | GCAGCAAGTAATCAGGGTAGTGGCGTCCCTTCTCGATTCAGTGGGAGCGGTAGCGGCAC | |
| | CGACTTCACCCTTACCATCTCATCACTTCAACCCGATGATTTTGCTACCTACTATTGCC | |
| | AGCAATCCAAGGAAGTTCCTTGGACCTTCGGGTGTGGGACAAAGGTAGAGATTAAACGT | |
| | ACGGTGGCAGCTCCCAGCGTTTTTATCTTTCCCCCATCCGACGAGCAGCTCAAGAGTGG | |
| | CACTGCCTCTGTAGTTTGTTTGCTGAATAACTTCTATCCACGTGAAGCAAAAGTACAGT | |
| | GGAAGGTCGATAATGCCCTTCAGAGCGGTAACAGCCAAGAAAGTGTTACCGAGCAAGAT | |
| | TCCAAAGATTCCACTTACAGTCTGTCCAGCACATTGACACTGAGTAAGGCTGATTACGA | |
| | AAAACACAAGGTGTACGCATGCGAGGTGACACACCAAGGTCTTTCATCTCCTGTAACTA | |
| | AGAGCTTTAACCGGGGAGAATGTGGTGGTGGGGGCAGCGGGGGCGGAGGTAGTGGAGGC | |
| | GGCGGTAGTGAACCAAAGAGTAGTGACAAAACTCACACGTGCCCACCGTGCCCAGCACC | |
| | TGAACTCCTGGGGGGACCGTCAGTCTTCCTCTTCCCCCCAAAACCCAAGGACACCCTCA | |
| | TGATCTCCCGGACCCCTGAGGTCACATGCGTGGTGGTGGACGTGAGCCACGAAGACCCT | |
| | GAGGTCAAGTTCAACTGGTACGTGGACGGCGTGGAGGTGCATAATGCCAAGACAAAGCC | |
| | GCGGGAGGAGCAGTACAACAGCACGTACCGTGTGGTCAGCGTCCTCACCGTCCTGCACC | |
| | AGGACTGGCTGAATGGCAAGGAGTACAAGTGCAAGGTCTCCAACAAAGCCCTCCCAGCC | |
| | CCCATCGAGAAAACCATCTCCAAAGCCAAAGGGCAGCCCCGAGAACCACAGGTGTACAC | |
| | CCTGCCCCCATGCCGGGAGGAGATGACCAAGAACCAGGTCAGCCTGTGGTGCCTGGTCA | |
| | AAGGCTTCTATCCCAGCGACATCGCCGTGGAGTGGGAGAGCAATGGGCAGCCGGAGAAC | |
| | AACTACAAGACCACGCCTCCCGTGCTGGACTCCGACGGCTCCTTCTTCCTCTACAGCAA | |
| | GCTCACCGTGGACAAGAGCAGGTGGCAGCAGGGGAACGTCTTCTCATGCTCCGTGATGC | |
| | ATGAGGCTCTGCACAACCACTACACGCAGAAGAGCCTCTCCCTGTCTCCGGGTAAA | |
| 33-5 HC | CAAGTCCAACTTCAGCAGCCTGGAGCTGAGGTAGTGAAACCCGGCGCATCTGTAAAAAT | 658 |
| | GAGCTGCAAAGCATCAGGTTACACATTTACATCCTACTACATCCATTGGATCAAGCAAA | |
| | CACCAGGCCAAGGTCTTGAGTGGGTTGGCGTCATTTACCCAGGAAACGATGATATATCT | |
| | TACAATCAGAAATTTCAAGGGAAAGCCACACTTACAGCCGACAAGAGTTCCACAACTGC | |
| | ATATATGCAACTCTCCTCCCTGACATCTGAAGACAGTGCCGTATACTATTGTGCTCGTG | |
| | AAGTCAGGCTCAGATACTTTGACGTGTGGGGTCAAGGCACAACCGTCACCGTCAGTAGC | |
| | GCTAGCACCAAAGGACCTAGTGTTTTTCCTCTTGCCCCTCAGGTACAGCTTGTGCAATC | |
| | TGGAGCTGAGGTCAAAAAACCAGGAAGTTCTGTAAAGGTGTCTTGTAAGGCATCTGGTT | |
| | ACACATTTACCGATTACAACATGCATTGGGTACGTCAAGCCCCTGGCCAGTGCCTGGAA | |
| | TGGATCGGATATATATACCCCTACAACGGTGGAACAGGTTACAACCAAAAATTCAAAAG | |
| | CAAGGCTACTATCACTGCCGACGAGAGCACTAACACCGCTTACATGGAACTGTCTTCCT | |
| | TGCGTTCAGAAGACACTGCCGTGTATTATTGTGCTCGGGGGCGACCCGCAATGGACTAT | |
| | TGGGGCCAAGGTACATTGGTGACTGTCAGTTCCGCTAGCACCAAAGGACCTAGTGTTTT | |
| | TCCTCTTGCCCCTTCCTCAAAGTCTACCTCTGGGGGGACAGCCGCTCTGGGCTGCCTGG | |
| | TCAAGGATTATTTCCCAGAGCCTGTCACTGTCAGTTGGAACTCTGGAGCCTTGACTTCT | |
| | GGTGTTCATACATTTCCTGCTGTCCTTCAAAGCAGCGGCTTGTACTCATTGTCTTCTGT | |
| | TGTGACAGTACCCTCAAGCAGCCTCGGCACTCAGACATACATCTGCAATGTCAACCACA | |
| | AACCCTCAAATACAAAGGTAGATAAAAAAGTCGAACCAAAGTCTTGTGACAAAACTCAC | |
| | ACGTGCCCACCGTGCCCAGCACCTGAACTCCTGGGGGGACCGTCAGTCTTCCTCTTCCC | |
| | CCCAAAACCCAAGGACACCCTCATGATCTCCCGGACCCCTGAGGTCACATGCGTGGTGG | |
| | TGGACGTGAGCCACGAAGACCCTGAGGTCAAGTTCAACTGGTACGTGGACGGCGTGGAG | |
| | GTGCATAATGCCAAGACAAAGCCGCGGGAGGAGCAGTACAACAGCACGTACCGTGTGGT | |
| | CAGCGTCCTCACCGTCCTGCACCAGGACTGGCTGAATGGCAAGGAGTACAAGTGCAAGG | |
| | TCTCCAACAAAGCCCTCCCAGCCCCCATCGAGAAAACCATCTCCAAAGCCAAAGGGCAG | |
| | CCCCGAGAACCACAGGTGTACACCCTGCCCCCATGCCGGGAGGAGATGACCAAGAACCA | |
| | GGTCAGCCTGTGGTGCCTGGTCAAAGGCTTCTATCCCAGCGACATCGCCGTGGAGTGGG | |
| | AGAGCAATGGGCAGCCGGAGAACAACTACAAGACCACGCCTCCCGTGCTGGACTCCGAC | |
| | GGCTCCTTCTTCCTCTACAGCAAGCTCACCGTGGACAAGAGCAGGTGGCAGCAGGGGAA | |
| | CGTCTTCTCATGCTCCGTGATGCATGAGGCTCTGCACAACCACTACACGCAGAAGAGCC | |
| | TCTCCCTGTCTCCGGGTAAA | |
| 33-5 LC | GAGATAGTCCTCACCCAATCACCAGGTAGTCTGGCTGTTAGCCCAGGTGAGCGAGTTAC | 659 |
| | TATGTCTTGCAAGTCCTCTCAATCTGTGTTCTTTTCATCAAGTCAGAAGAATTATCTTG | |
| | CCTGGTATCAGCAGATTCCTGGTCAATCTCCCCGACTGCTTATTTACTGGGCTTCAACT | |
| | CGGGAGTCAGGGGTTCCCGACCGATTCACAGGGTCTGGGTCAGGAACTGACTTTACCCT | |
| | TACTATCAGCTCTGTGCAGCCTGAAGACCTCGCAATATATTATTGTCATCAGTACCTCT | |
| | CTTCTCGCACTTTTGGACAGGGCACCAAATTGGAGATTAAGCGTACGGTGGCCGCTCCC | |
| | TCCGTTTTTATCTTTCCCCCAGACATCCAAATGACACAGTCCCCTAGCTCACTTTCAGC | |
| | AAGCGTGGGGGACCGAGTTACTATCACATGCCGCGCAAGTGAGTCTGTGGACAACTATG | |
| | GAATATCATTCATGAACTGGTTCCAGCAGAAACCTGGGAAAGCACCCAAGCTGCTTATC | |
| | TACGCAGCAAGTAATCAGGGTAGTGGCGTCCCTTCTCGATTCAGTGGGAGCGGTAGCGG | |
| | CACCGACTTCACCCTTACCATCTCATCACTTCAACCCGATGATTTTGCTACCTACTATT | |
| | GCCAGCAATCCAAGGAAGTTCCTTGGACCTTCGGGTGTGGGACAAAGGTAGAGATTAAA | |
| | CGTACGGTGGCAGCTCCCAGCGTTTTTATCTTTCCCCCATCCGACGAGCAGCTCAAGAG | |
| | TGGCACTGCCTCTGTAGTTTGTTTGCTGAATAACTTCTATCCACGTGAAGCAAAAGTAC | |
| | AGTGGAAGGTCGATAATGCCCTTCAGAGCGGTAACAGCCAAGAAAGTGTTACCGAGCAA | |
| | GATTCCAAAGATTCCACTTACAGTCTGTCCAGCACATTGACACTGAGTAAGGCTGATTA | |
| | CGAAAAACACAAGGTGTACGCATGCGAGGTGACACACCAAGGTCTTTCATCTCCTGTAA | |
| | CTAAGAGCTTTAACCGGGGAGAATGTGGTGGTGGGGGCAGCGGGGGCGGAGGTAGTGGA | |
| | GGCGGCGGTAGTGAACCAAAGAGTAGTGACAAAACTCACACGTGCCCACCGTGCCCAGC | |
| | ACCTGAACTCCTGGGGGGACCGTCAGTCTTCCTCTTCCCCCCAAAACCCAAGGACACCC | |
| | TCATGATCTCCCGGACCCCTGAGGTCACATGCGTGGTGGTGGACGTGAGCCACGAAGAC | |
| | CCTGAGGTCAAGTTCAACTGGTACGTGGACGGCGTGGAGGTGCATAATGCCAAGACAAA | |
| | GCCGCGGGAGGAGCAGTACAACAGCACGTACCGTGTGGTCAGCGTCCTCACCGTCCTGC | |
| | ACCAGGACTGGCTGAATGGCAAGGAGTACAAGTGCAAGGTCTCCAACAAAGCCCTCCCA | |
| | GCCCCCATCGAGAAAACCATCTCCAAAGCCAAAGGGCAGCCCCGAGAACCACAGGTGTA | |
| | CACCCTGCCCCCATGCCGGGAGGAGATGACCAAGAACCAGGTCAGCCTGTGGTGCCTGG | |
| | TCAAAGGCTTCTATCCCAGCGACATCGCCGTGGAGTGGGAGAGCAATGGGCAGCCGGAG | |
| | AACAACTACAAGACCACGCCTCCCGTGCTGGACTCCGACGGCTCCTTCTTCCTCTACAG | |
| | CAAGCTCACCGTGGACAAGAGCAGGTGGCAGCAGGGGAACGTCTTCTCATGCTCCGTGA | |
| | TGCATGAGGCTCTGCACAACCACTACACGCAGAAGAGCCTCTCCCTGTCTCCGGGTAAA | |
| 33-6 HC | CAGGTACAGCTTGTGCAATCTGGAGCTGAGGTCAAAAAACCAGGAAGTTCTGTAAAGGT | 660 |
| | GTCTTGTAAGGCATCTGGTTACACATTTACCGATTACAACATGCATTGGGTACGTCAAG | |
| | CCCCTGGCCAGGGCCTGGAATGGATCGGATATATATACCCCTACAACGGTGGAACAGGT | |
| | TACAACCAAAAATTCAAAAGCAAGGCTACTATCACTGCCGACGAGAGCACTAACACCGC | |
| | TTACATGGAACTGTCTTCCTTGCGTTCAGAAGACACTGCCGTGTATTATTGTGCTCGGG | |
| | GGCGACCCGCAATGGACTATTGGGGCCAAGGTACATTGGTGACTGTCAGTTCCGCTAGC | |
| | ACCAAAGGACCTAGTGTTTTTCCTCTTGCCCCTGAGGTTCAGTTGGTTCAGTCAGGAGC | |
| | AGAGGTCAAAAAACCTGGAAGCTCTGTCAAAGTTAGTTGTAAGGCCAGTGGATACACCA | |
| | TAACCGATTCAAATATACATTGGGTTAGGCAAGCACCAGGACAGTGCTTGGAATGGATC | |
| | GGGTACATCTATCCATATAATGGGGGCACCGATTACAACCAAAAGTTTAAGAATCGCGC | |
| | CACACTCACTGTTGATAATCCAACCAATACAGCATACATGGAGTTGAGCAGTCTTCGGT | |
| | CCGAGGACACTGCTTTTTACTATTGTGTGAACGGTAACCCATGGTTGGCCTATTGGGGC | |
| | CAAGGTACACTTGTAACAGTTTCATCTGCTAGCACCAAAGGACCTAGTGTTTTTCCTCT | |
| | TGCCCCTTCCTCAAAGTCTACCTCTGGGGGGACAGCCGCTCTGGGCTGCCTGGTCAAGG | |
| | ATTATTTCCCAGAGCCTGTCACTGTCAGTTGGAACTCTGGAGCCTTGACTTCTGGTGTT | |
| | CATACATTTCCTGCTGTCCTTCAAAGCAGCGGCTTGTACTCATTGTCTTCTGTTGTGAC | |
| | AGTACCCTCAAGCAGCCTCGGCACTCAGACATACATCTGCAATGTCAACCACAAACCCT | |
| | CAAATACAAAGGTAGATAAAAAAGTCGAACCAAAGTCTTGTGACAAAACTCACACGTGC | |
| | CCACCGTGCCCAGCACCTGAACTCCTGGGGGGACCGTCAGTCTTCCTCTTCCCCCCAAA | |
| | ACCCAAGGACACCCTCATGATCTCCCGGACCCCTGAGGTCACATGCGTGGTGGTGGACG | |
| | TGAGCCACGAAGACCCTGAGGTCAAGTTCAACTGGTACGTGGACGGCGTGGAGGTGCAT | |
| | AATGCCAAGACAAAGCCGCGGGAGGAGCAGTACAACAGCACGTACCGTGTGGTCAGCGT | |
| | CCTCACCGTCCTGCACCAGGACTGGCTGAATGGCAAGGAGTACAAGTGCAAGGTCTCCA | |
| | ACAAAGCCCTCCCAGCCCCCATCGAGAAAACCATCTCCAAAGCCAAAGGGCAGCCCCGA | |
| | GAACCACAGGTGTACACCCTGCCCCCATGCCGGGAGGAGATGACCAAGAACCAGGTCAG | |
| | CCTGTGGTGCCTGGTCAAAGGCTTCTATCCCAGCGACATCGCCGTGGAGTGGGAGAGCA | |
| | ATGGGCAGCCGGAGAACAACTACAAGACCACGCCTCCCGTGCTGGACTCCGACGGCTCC | |
| | TTCTTCCTCTACAGCAAGCTCACCGTGGACAAGAGCAGGTGGCAGCAGGGGAACGTCTT | |
| | CTCATGCTCCGTGATGCATGAGGCTCTGCACAACCACTACACGCAGAAGAGCCTCTCCC | |
| | TGTCTCCGGGTAAA | |
| 33-6 LC | GACATCCAAATGACACAGTCCCCTAGCTCACTTTCAGCAAGCGTGGGGGACCGAGTTAC | 661 |
| | TATCACATGCCGCGCAAGTGAGTCTGTGGACAACTATGGAATATCATTCATGAACTGGT | |
| | TCCAGCAGAAACCTGGGAAAGCACCCAAGCTGCTTATCTACGCAGCAAGTAATCAGGGT | |
| | AGTGGCGTCCCTTCTCGATTCAGTGGGAGCGGTAGCGGCACCGACTTCACCCTTACCAT | |
| | CTCATCACTTCAACCCGATGATTTTGCTACCTACTATTGCCAGCAATCCAAGGAAGTTC | |
| | CTTGGACCTTCGGGCAAGGGACAAAGGTAGAGATTAAACGTACGGTGGCAGCTCCCAGC | |
| | GTTTTTATCTTTCCCCCATCCGACGAGCAGCTCAAGAGTGGCACTGCCTCTGTAGTTTG | |
| | TTTGCTGAATAACTTCTATCCACGTGAAGCAAAAGTACAGTGGAAGGTCGATAATGCCC | |
| | TTCAGAGCGGTAACAGCCAAGAAAGTGTTACCGAGCAAGATTCCAAAGATTCCACTTAC | |
| | AGTCTGTCCAGCACATTGACACTGAGTAAGGCTGATTACGAAAAACACAAGGTGTACGC | |
| | ATGCGAGGTGACACACCAAGGTCTTTCATCTCCTGTAACTAAGAGCTTTAACCGGGGAG | |
| | AATGTGGTGGTGGGGGCAGCGGGGGCGGAGGTAGTGGAGGCGGCGGTAGTGAACCAAAG | |
| | AGTAGTGACAAAACTCACACGTGCCCACCGTGCCCAGCACCTGAACTCCTGGGGGGACC | |
| | GTCAGTCTTCCTCTTCCCCCCAAAACCCAAGGACACCCTCATGATCTCCCGGACCCCTG | |
| | AGGTCACATGCGTGGTGGTGGACGTGAGCCACGAAGACCCTGAGGTCAAGTTCAACTGG | |
| | TACGTGGACGGCGTGGAGGTGCATAATGCCAAGACAAAGCCGCGGGAGGAGCAGTACAA | |
| | CAGCACGTACCGTGTGGTCAGCGTCCTCACCGTCCTGCACCAGGACTGGCTGAATGGCA | |
| | AGGAGTACAAGTGCAAGGTCTCCAACAAAGCCCTCCCAGCCCCCATCGAGAAAACCATC | |
| | TCCAAAGCCAAAGGGCAGCCCCGAGAACCACAGGTGTACACCCTGCCCCCATGCCGGGA | |
| | GGAGATGACCAAGAACCAGGTCAGCCTGTGGTGCCTGGTCAAAGGCTTCTATCCCAGCG | |
| | ACATCGCCGTGGAGTGGGAGAGCAATGGGCAGCCGGAGAACAACTACAAGACCACGCCT | |
| | CCCGTGCTGGACTCCGACGGCTCCTTCTTCCTCTACAGCAAGCTCACCGTGGACAAGAG | |
| | CAGGTGGCAGCAGGGGAACGTCTTCTCATGCTCCGTGATGCATGAGGCTCTGCACAACC | |
| | ACTACACGCAGAAGAGCCTCTCCCTGTCTCCGGGTAAA | |
| 33-7 HC | CAGGTACAGCTTGTGCAATCTGGAGCTGAGGTCAAAAAACCAGGAAGTTCTGTAAAGGT | 662 |
| | GTCTTGTAAGGCATCTGGTTACACATTTACCGATTACAACATGCATTGGGTACGTCAAG | |
| | CCCCTGGCCAGGGCCTGGAATGGATCGGATATATATACCCCTACAACGGTGGAACAGGT | |
| | TACAACCAAAAATTCAAAAGCAAGGCTACTATCACTGCCGACGAGAGCACTAACACCGC | |
| | TTACATGGAACTGTCTTCCTTGCGTTCAGAAGACACTGCCGTGTATTATTGTGCTCGGG | |
| | GGCGACCCGCAATGGACTATTGGGGCCAAGGTACATTGGTGACTGTCAGTTCCGCTAGC | |
| | ACCAAAGGACCTAGTGTTTTTCCTCTTGCCCCTCAAGTCCAACTTCAGCAGCCTGGAGC | |
| | TGAGGTAGTGAAACCCGGCGCATCTGTAAAAATGAGCTGCAAAGCATCAGGTTACACAT | |
| | TTACATCCTACTACATCCATTGGATCAAGCAAACACCAGGCCAATGTCTTGAGTGGGTT | |
| | GGCGTCATTTACCCAGGAAACGATGATATATCTTACAATCAGAAATTTCAAGGGAAAGC | |
| | CACACTTACAGCCGACAAGAGTTCCACAACTGCATATATGCAACTCTCCTCCCTGACAT | |
| | CTGAAGACAGTGCCGTATACTATTGTGCTCGTGAAGTCAGGCTCAGATACTTTGACGTG | |
| | TGGGGTCAAGGCACAACCGTCACCGTCAGTAGCGCTAGCACCAAAGGACCTAGTGTTTT | |
| | TCCTCTTGCCCCTTCCTCAAAGTCTACCTCTGGGGGGACAGCCGCTCTGGGCTGCCTGG | |
| | TCAAGGATTATTTCCCAGAGCCTGTCACTGTCAGTTGGAACTCTGGAGCCTTGACTTCT | |
| | GGTGTTCATACATTTCCTGCTGTCCTTCAAAGCAGCGGCTTGTACTCATTGTCTTCTGT | |
| | TGTGACAGTACCCTCAAGCAGCCTCGGCACTCAGACATACATCTGCAATGTCAACCACA | |
| | AACCCTCAAATACAAAGGTAGATAAAAAAGTCGAACCAAAGTCTTGTGACAAAACTCAC | |
| | ACGTGCCCACCGTGCCCAGCACCTGAACTCCTGGGGGGACCGTCAGTCTTCCTCTTCCC | |
| | CCCAAAACCCAAGGACACCCTCATGATCTCCCGGACCCCTGAGGTCACATGCGTGGTGG | |
| | TGGACGTGAGCCACGAAGACCCTGAGGTCAAGTTCAACTGGTACGTGGACGGCGTGGAG | |
| | GTGCATAATGCCAAGACAAAGCCGCGGGAGGAGCAGTACAACAGCACGTACCGTGTGGT | |
| | CAGCGTCCTCACCGTCCTGCACCAGGACTGGCTGAATGGCAAGGAGTACAAGTGCAAGG | |
| | TCTCCAACAAAGCCCTCCCAGCCCCCATCGAGAAAACCATCTCCAAAGCCAAAGGGCAG | |
| | CCCCGAGAACCACAGGTGTACACCCTGCCCCCATGCCGGGAGGAGATGACCAAGAACCA | |
| | GGTCAGCCTGTGGTGCCTGGTCAAAGGCTTCTATCCCAGCGACATCGCCGTGGAGTGGG | |
| | AGAGCAATGGGCAGCCGGAGAACAACTACAAGACCACGCCTCCCGTGCTGGACTCCGAC | |
| | GGCTCCTTCTTCCTCTACAGCAAGCTCACCGTGGACAAGAGCAGGTGGCAGCAGGGGAA | |
| | CGTCTTCTCATGCTCCGTGATGCATGAGGCTCTGCACAACCACTACACGCAGAAGAGCC | |
| | TCTCCCTGTCTCCGGGTAAA | |
| 33-7 LC | GACATCCAAATGACACAGTCCCCTAGCTCACTTTCAGCAAGCGTGGGGGACCGAGTTAC | 663 |
| | TATCACATGCCGCGCAAGTGAGTCTGTGGACAACTATGGAATATCATTCATGAACTGGT | |
| | TCCAGCAGAAACCTGGGAAAGCACCCAAGCTGCTTATCTACGCAGCAAGTAATCAGGGT | |
| | AGTGGCGTCCCTTCTCGATTCAGTGGGAGCGGTAGCGGCACCGACTTCACCCTTACCAT | |
| | CTCATCACTTCAACCCGATGATTTTGCTACCTACTATTGCCAGCAATCCAAGGAAGTTC | |
| | CTTGGACCTTCGGGCAAGGGACAAAGGTAGAGATTAAACGTACGGTGGCCGCTCCCTCC | |
| | GTTTTTATCTTTCCCCCAGAGATAGTCCTCACCCAATCACCAGGTAGTCTGGCTGTTAG | |
| | CCCAGGTGAGCGAGTTACTATGTCTTGCAAGTCCTCTCAATCTGTGTTCTTTTCATCAA | |
| | GTCAGAAGAATTATCTTGCCTGGTATCAGCAGATTCCTGGTCAATCTCCCCGACTGCTT | |
| | ATTTACTGGGCTTCAACTCGGGAGTCAGGGGTTCCCGACCGATTCACAGGGTCTGGGTC | |
| | AGGAACTGACTTTACCCTTACTATCAGCTCTGTGCAGCCTGAAGACCTCGCAATATATT | |
| | ATTGTCATCAGTACCTCTCTTCTCGCACTTTTGGATGTGGCACCAAATTGGAGATTAAG | |
| | CGTACGGTGGCAGCTCCCAGCGTTTTTATCTTTCCCCCATCCGACGAGCAGCTCAAGAG | |
| | TGGCACTGCCTCTGTAGTTTGTTTGCTGAATAACTTCTATCCACGTGAAGCAAAAGTAC | |
| | AGTGGAAGGTCGATAATGCCCTTCAGAGCGGTAACAGCCAAGAAAGTGTTACCGAGCAA | |
| | GATTCCAAAGATTCCACTTACAGTCTGTCCAGCACATTGACACTGAGTAAGGCTGATTA | |
| | CGAAAAACACAAGGTGTACGCATGCGAGGTGACACACCAAGGTCTTTCATCTCCTGTAA | |
| | CTAAGAGCTTTAACCGGGGAGAATGTGGTGGTGGGGGCAGCGGGGGCGGAGGTAGTGGA | |
| | GGCGGCGGTAGTGAACCAAAGAGTAGTGACAAAACTCACACGTGCCCACCGTGCCCAGC | |
| | ACCTGAACTCCTGGGGGGACCGTCAGTCTTCCTCTTCCCCCCAAAACCCAAGGACACCC | |
| | TCATGATCTCCCGGACCCCTGAGGTCACATGCGTGGTGGTGGACGTGAGCCACGAAGAC | |
| | CCTGAGGTCAAGTTCAACTGGTACGTGGACGGCGTGGAGGTGCATAATGCCAAGACAAA | |
| | GCCGCGGGAGGAGCAGTACAACAGCACGTACCGTGTGGTCAGCGTCCTCACCGTCCTGC | |
| | ACCAGGACTGGCTGAATGGCAAGGAGTACAAGTGCAAGGTCTCCAACAAAGCCCTCCCA | |
| | GCCCCCATCGAGAAAACCATCTCCAAAGCCAAAGGGCAGCCCCGAGAACCACAGGTGTA | |
| | CACCCTGCCCCCATGCCGGGAGGAGATGACCAAGAACCAGGTCAGCCTGTGGTGCCTGG | |
| | TCAAAGGCTTCTATCCCAGCGACATCGCCGTGGAGTGGGAGAGCAATGGGCAGCCGGAG | |
| | AACAACTACAAGACCACGCCTCCCGTGCTGGACTCCGACGGCTCCTTCTTCCTCTACAG | |
| | CAAGCTCACCGTGGACAAGAGCAGGTGGCAGCAGGGGAACGTCTTCTCATGCTCCGTGA | |
| | TGCATGAGGCTCTGCACAACCACTACACGCAGAAGAGCCTCTCCCTGTCTCCGGGTAAA | |

[0391] Table 70 below shows the polypeptide sequences of the heavy chain variable region (VH) and light chain variable region (VL) of the engineered antibodies targeting CD33. Table 71 below shows the nucleotide sequences of the heavy chain variable region (VH) and light chain variable region (VL) of the engineered antibodies targeting CD33.

TABLE 70

| Name | | Sequence | SEQ ID NO |
|---|---|---|---|
| 33-1 | VH | EVQLVQSGAEVKKFGSSVKVSCKASGYTITDSNIHWVRQAPGQCLEWIGYIYPYNGGTDYN | 664 |
| | | QKFKNRATLTVDNPTNTAYMELSSLRSEDTAFYYCVNGNFWLAYWGQGTLVTVSS | |
| | VL | DIQLTQSPSTLSASVGDRVTITCRASESLDNYGIRFLTWFQQKPGKAPKLLMYAASNQGSG | 665 |
| | | VPSRFSGSGSGTEFTLTISSLQPDDFATYYCQQTKEVPWSFGCGTKVEIK | |
| 33-2 | VH | QVQLVQSGAEVKKPGSSVKVSCKASGYTFTDYNMHWVRQAPGQCLEWIGYIYPYNGGTGYN | 666 |
| | | QKFKSKATITADESTNTAYMELSSLRSEDTAVYYCARGRPAMDYWGQGTLVTVSS | |
| | VL | DIQMTQSPSSLSASVGDRVTITCRASESVDNYGISFMNWFQQKPGKAPKLLIYAASNQGSG | 667 |
| | | VPSRFSGSGSGTDFTLTISSLQPDDFATYYCQQSKEVPWTFGCGTKVEIK | |
| 33-3 | VH | QVQLQQPGAEVVKPGASVKMSCKASGYTFTSYYIHWIKQTPGQCLEWVGVIYPGNDDISYN | 668 |
| | | QKFQGKATLTADKSSTTAYMQLSSLTSEDSAVYYCAREVRLRYFDVWGQGTTVTVSS | |
| | VL | EIVLTQSPGSLAVSPGERVTMSCKSSQSVFFSSSQKNYLAWYQQIPGQSPRLLIYWASTRE | 669 |
| | | SGVPDRFTGSGSGTDFTLTISSVQPEDLAIYYCHQYLSSRTFGCGTKLEIK | |
| 33-4 | VH1 | EVQLVQSGAEVKKPGSSVKVSCKASGYTITDSNIHWVRQAPGQSLEWIGYIYPYNGGTDYN | 670 |
| | | QKFKNRATLTVDNPTNTAYMELSSLRSEDTAFYYCVNGNPWLAYWGQGTLVTVSS | |
| | VH2 | QVQLVQSGAEVKKPGSSVKVSCKASGYTFTDYNMHWVRQAPGQCLEWIGYIYPYNGGTGYN | 666 |
| | | QKFKSKATITADESTNTAYMELSSLRSEDTAVYYCARGRPAMDYWGQGLTVTVSS | |
| | VL1 | DIQLTQSPSTLSASVGDRVTITCRASESLDNYGIRFLTWFQQKPGKAPKLLMYAASNQGSG | 671 |
| | | VPSRFSGSGSGTEFTLTISSLQPDDFATYYCQQTKEVPWSFGQGTKVEVK | |
| | VL2 | DIQMTQSPSSLSASVGDRVTITCRASESVDNYGISFMNWFQQKPGKAPKLLIYAASNQGSG | 667 |
| | | VPSRFSGSGSGTDFTLTISSLQPDDFATYYCQQSKEVPWTFGCGTKVEIK | |
| 33-5 | VH1 | QVQLQQPGAEVKKPFASVKMSCKASGYTFTSYYIHWIKQTPGQGLEWVGVIYPGNDDISYN | 672 |
| | | QKFQGKATLTADKSSTTAYMQLSSLTSEDSAVYYCAREVRLRYFDVWGQGTTVTVSS | |
| | VH2 | QVQLVQSGAEVKKPGSSVKVSCKASGYTFTDYNMHWVRQAPGQCLEWIGYIYPYNGGTGYN | 666 |
| | | QKFKSKATITADESTNTAYMELSSLRSEDTAVYYCARGRPAMDYWGQGTLVTVSS | |
| | VL1 | EIVLTQSPGSLAVSPGERVTMSCKSSQSVFFSSSQKNYLAWYQQIPGQSPRLLIYWASTRE | 673 |
| | | SGVPDRFTGSGSGTDDTLTISSVQPEDLAIYYCHQYLSSRTFGQGTKLEIK | |
| | VL2 | DIQMTQSPSSLSASVGDRVTITCRASESVDNYGISFMNWFQQKPGKAPKLLIYAASNQGSG | 667 |
| | | VPSRFSGSGSGTDFTLTISSLQPDDFATYYCQQSKEVPWTFGCGTKVEIK | |
| 33-6 | VH1 | QVQLVQSGAEVKKPGSSVKVSCKASGYTFTDYNMHWVRQAPGQGLEWIGYIYPYNGGTGYN | 674 |
| | | QKFKSKATITADESTNTAYMELSSLRSEDTAVYYCARGRPAMDYWGQGTLVTVSS | 664 |
| | VH2 | EVQLVQSGAEVKKPGSSVKVSCKASGYTITDSNIHWVRQAPGQCLEWIGYIYPYNGGTDYN | |
| | | QKFKNRATLTVDNPTNTAYMELSSLRSEDTAFYYCVNGNPWLAYWGQGTLVTVSS | 675 |
| | VL1 | DIQMTQSPSSLSASVGDRVTITCRASESVDNYGISFMNWFQQKPGKAPKLLIYAASNQGSG | |
| | | VPSRFSGSGSGTDFTLTISSLQPDDFATYYCQQSKEVPWTFGQGTKVEIK | 665 |
| | VL2 | DIQLTQSPSTLSASVGDRVTITCRASESLDNYGIRFLTWFQQKPGKAPKLLMYAASNQGSG | |
| | | VPSRFSGSGSGTEFTLTISSLQPDDFATYYCQQTKEVPWSFGCGTKVEVK | |
| 33-7 | VH1 | QVQLVQSGAEVKKPGSSVKVSCKASGYTFTDYNMHWVRQAPGQGLEWIGYIYPYNGGTGYN | 674 |
| | | QKFKSKATITADESTNTAYMELSSLRSEDTAVYYCARGRPAMDYWGQGTLVTVSS | |
| | VH2 | QVQLQQPGAEVKKPGASVKMSCKASGYTFTSYYIHWIKQTPGQCLEWVGVIYPGNDDISYN | 668 |
| | | QKFQGKATLTADKSSTTAYMQLSSLTSEDSAVYYVAREVRLRYFDVWGQGTTVTVSS | |
| | VL1 | DIQMTQSPSSLSASVGDRVTITCRASESVDNYGISFMNWFQQKPGKAPKLLIYAASNQGSG | 675 |
| | | VPSRFSGSGSGTDFTLTISSLQPDDFATYYCQQSKEVPWTFGQGTKVEIK | |
| | VL2 | EIVLTQSPGSLAVSPGERVTMSCKSSQSVFFSSSQKNYLAWYQQIPGQSPRLLIYWASTRE | 669 |
| | | SGVPSRFTGSGSGTDFTLTISSVQPEDLAIYYCHQYLSSRTFGCGTKLEIK | |

TABLE 71

| Name | | Sequence | SEQ ID NO |
|---|---|---|---|
| 33-1 | VH | GAGGTTCAGTTGGTTCAGTCAGGAGCAGAGGTCAAAAAACCTGGAAGCTCTGTCAAAGTTA | 676 |
| | | GTTGTAAGGCCAGTGGATACACCATAACCGATTCAAATATACATTGGGTTAGGCAAGCACC | |
| | | AGGACAGTGCTTGGAATGGATCGGGTACATCTATCCATATAATGGGGGCACCGATTACAAC | |
| | | CAAAAGTTTAAGAATCGCGCCACACTCACTGTTGATAATCCAACCAATACAGCATACATGG | |
| | | AGTTGAGCAGTCTTCGGTCCGAGGACACTGCTTTTTACTATTGTGTGAACGGTAACCCATG | |
| | | GTTGGCCTATTGGGGCCAAGGTACACTTGTAACAGTTTCATCT | |
| | VL | GATATACAACTGACTCAGAGTCCCAGCACTCTCAGTGCAAGTGTAGGCGATAGAGTAACTA | 677 |
| | | TAACCTGTCGCGCCTCAGAATCTCTTGATAATTATGGGATCCGATTTCTTACTTGGTTTCA | |
| | | GCAAAAGCCTGGTAAAGCTCCTAAATTGCTCATGTATGCCGCCAGTAATCAGGGTTCAGGA | |
| | | GTTCCTAGTCGTTTCTCTGGGTCAGGAAGCGGCACAGAATTTACCCTTACAATTTCCAGCC | |
| | | TCCAGCCCGACGATTTCGCCACTTACTATTGCCAACAAACTAAAGAGGTTCCTTGGAGTTT | |
| | | TGGGTGTGGCACCAAGGTAGAAGTAAAA | |
| 33-2 | VH | CAGGTACAGCTTGTGCAATCTGGAGCTGAGGTCAAAAAACCAGGAAGTTCTGTAAAGGTGT | 678 |
| | | CTTGTAAGGCATCTGGTTACACATTTACCGATTACAACATGCATTGGGTACGTCAAGCCCC | |
| | | TGGCCAGTGCCTGGAATGGATCGGATATATATACCCCTACAACGGTGGAACAGGTTACAAC | |
| | | CAAAAATTCAAAAGCAAGGCTACTATCACTGCCGACGAGAGCACTAACACCGCTTACATGG | |
| | | AACTGTCTTCCTTGCGTTCAGAAGACACTGCCGTGTATTATTGTGCTCGGGGGCGACCCGC | |
| | | AATGGACTATTGGGGCCAAGGTACATTGGTGACTGTCAGTTCC | |
| | VL | GACATCCAAATGACACAGTCCCCTAGCTCACTTTCAGCAAGCGTGGGGGACCGAGTTACTA | 679 |
| | | TCACATGCCGCGCAAGTGAGTCTGTGGACAACTATGGAATATCATTCATGAACTGGTTCCA | |
| | | GCAGAAACCTGGGAAAGCACCCAAGCTGCTTATCTACGCAGCAAGTAATCAGGGTAGTGGC | |
| | | GTCCCTTCTCGATTCAGTGGGAGCGGTAGCGGCACCGACTTCACCCTTACCATCTCATCAC | |
| | | TTCAACCCGATGATTTTGCTACCTACTATTGCCAGCAATCCAAGGAAGTTCCTTGGACCTT | |
| | | CGGGTGTGGGACAAAGGTAGAGATTAAA | |
| 33-3 | VH | CAAGTCCAACTTCAGCAGCCTGGAGCTGAGGTAGTGAAACCCGGCGCATCTGTAAAAATGA | 680 |
| | | GCTGCAAAGCATCAGGTTACACATTTACATCCTACTACATCCATTGGATCAAGCAAACACC | |
| | | AGGCCAATGTCTTGAGTGGGTTGGCGTCATTTACCCAGGAAACGATGATATATCTTACAAT | |
| | | CAGAAATTTCAAGGGAAAGCCACACTTACAGCCGACAAGAGTTCCACAACTGCATATATGC | |
| | | AACTCTCCTCCCTGACATCTGAAGACAGTGCCGTATACTATTGTGCTCGTGAAGTCAGGCT | |
| | | CAGATACTTTGACGTGTGGGGTCAAGGCACAACCGTCACCGTCAGTAGC | |
| | VL | GAGATAGTCCTCACCCAATCACCAGGTAGTCTGGCTGTTAGCCCAGGTGAGCGAGTTACTA | 681 |
| | | TGTCTTGCAAGTCCTCTCAATCTGTGTTCTTTTCATCAAGTCAGAAGAATTATCTTGCCTG | |
| | | GTATCAGCAGATTCCTGGTCAATCTCCCCGACTGCTTATTTACTGGGCTTCAACTCGGGAG | |
| | | TCAGGGGTTCCCGACCGATTCACAGGGTCTGGGTCAGGAACTGACTTTACCCTTACTATCA | |
| | | GCTCTGTGCAGCCTGAAGACCTCGCAATATATTATTGTCATCAGTACCTCTCTTCTCGCAC | |
| | | TTTTGGATGTGGCACCAAATTGGAGATTAAG | |
| 33-4 | VH1 | GAGGTTCAGTTGGTTCAGTCAGGAGCAGAGGTCAAAAAACCTGGAAGCTCTGTCAAAGTTA | 682 |
| | | GTTGTAAGGCCAGTGGATACACCATAACCGATTCAAATATACATTGGGTTAGGCAAGCACC | |
| | | AGGACAGTCCTTGGAATGGATCGGGTACATCTATCCATATAATGGGGGCACCGATTACAAC | |
| | | CAAAAGTTTAAGAATCGCGCCACACTCACTGTTGATAATCCAACCAATACAGCATACATGG | |
| | | AGTTGAGCAGTCTTCGGTCCGAGGACACTGCTTTTTACTATTGTGTGAACGGTAACCCATG | |
| | | GTTGGCCTATTGGGGCCAAGGTACACTTGTAACAGTTTCATCC | |
| | VH2 | CAGGTACAGCTTGTGCAATCTGGAGCTGAGGTCAAAAAACCAGGAAGTTCTGTAAAGGTGT | 678 |
| | | CTTGTAAGGCATCTGGTTACACATTTACCGATTACAACATGCATTGGGTACGTCAAGCCCC | |
| | | TGGCCAGTGCCTGGAATGGATCGGATATATATACCCCTACAACGGTGGAACAGGTTACAAC | |
| | | CAAAAATTCAAAAGCAAGGCTACTATCACTGCCGACGAGAGCACTAACACCGCTTACATGG | |
| | | AACTGTCTTCCTTGCGTTCAGAAGACACTGCCGTGTATTATTGTGCTCGGGGGCGACCCGC | |
| | | AATGGACTATTGGGGCCAAGGTACATTGGTGACTGTCAGTTCC | |
| | VL1 | GATATACAACTGACTCAGAGTCCCAGCACTCTCAGTGCAAGTGTAGGCGATAGAGTAACTA | 683 |
| | | TAACCTGTCGCGCCTCAGAATCTCTTGATAATTATGGGATCCGATTTCTTACTTGGTTTCA | |
| | | GCAAAAGCCTGGTAAAGCTCCTAAATTGCTCATGTATGCCGCCAGTAATCAGGGTTCAGGA | |
| | | GTTCCTAGTCGTTTCTCTGGGTCAGGAAGCGGCACAGAATTTACCCTTACAATTTCCAGCC | |
| | | TCCAGCCCGACGATTTCGCCACTTACTATTGCCAACAAACTAAAGAGGTTCCTTGGAGTTT | |
| | | TGGGCAAGGCACCAAGGTAGAAGTAAAA | |
| | VL2 | GACATCCAAATGACACAGTCCCCTAGCTCACTTTCAGCAAGCGTGGGGGACCGAGTTACTA | 679 |
| | | TCACATGCCGCGCAAGTGAGTCTGTGGACAACTATGGAATATCATTCATGAACTGGTTCCA | |
| | | GCAGAAACCTGGGAAAGCACCCAAGCTGCTTATCTACGCAGCAAGTAATCAGGGTAGTGGC | |
| | | GTCCCTTCTCGATTCAGTGGGAGCGGTAGCGGCACCGACTTCACCCTTACCATCTCATCAC | |
| | | TTCAACCCGATGATTTTGCTACCTACTATTGCCAGCAATCCAAGGAAGTTCCTTGGACCTT | |
| | | CGGGTGTGGGACAAAGGTAGAGATTAAA | |
| 33-5 | VH1 | CAAGTCCAACTTCAGCAGCCTGGAGCTGAGGTAGTGAAACCCGGCGCATCTGTAAAAATGA | 684 |
| | | GCTGCAAAGCATCAGGTTACACATTTACATCCTACTACATCCATTGGATCAAGCAAACACC | |
| | | AGGCCAAGGTCTTGAGTGGGTTGGCGTCATTTACCCAGGAAACGATGATATATCTTACAAT | |
| | | CAGAAATTTCAAGGGAAAGCCACACTTACAGCCGACAAGAGTTCCACAACTGCATATATGC | |
| | | AACTCTCCTCCCTGACATCTGAAGACAGTGCCGTATACTATTGTGCTCGTGAAGTCAGGCT | |
| | | CAGATACTTTGACGTGTGGGGTCAAGGCACAACCGTCACCGTCAGTAGC | |
| | VH2 | CAGGTACAGCTTGTGCAATCTGGAGCTGAGGTCAAAAAACCAGGAAGTTCTGTAAAGGTGT | 678 |
| | | CTTGTAAGGCATCTGGTTACACATTTACCGATTACAACATGCATTGGGTACGTCAAGCCCC | |
| | | TGGCCAGTGCCTGGAATGGATCGGATATATATACCCCTACAACGGTGGAACAGGTTACAAC | |
| | | CAAAAATTCAAAAGCAAGGCTACTATCACTGCCGACGAGAGCACTAACACCGCTTACATGG | |
| | | AACTGTCTTCCTTGCGTTCAGAAGACACTGCCGTGTATTATTGTGCTCGGGGGCGACCCGC | |
| | | AATGGACTATTGGGGCCAAGGTACATTGGTGACTGTCAGTTCC | |
| | VL1 | GAGATAGTCCTCACCCAATCACCAGGTAGTCTGGCTGTTAGCCCAGGTGAGCGAGTTACTA | 685 |
| | | TGTCTTGCAAGTCCTCTCAATCTGTGTTCTTTTCATCAAGTCAGAAGAATTATCTTGCCTG | |
| | | GTATCAGCAGATTCCTGGTCAATCTCCCCGACTGCTTATTTACTGGGCTTCAACTCGGGAG | |
| | | TCAGGGGTTCCCGACCGATTCACAGGGTCTGGGTCAGGAACTGACTTTACCCTTACTATCA | |
| | | GCTCTGTGCAGCCTGAAGACCTCGCAATATATTATTGTCATCAGTACCTCTCTTCTCGCAC | |
| | | TTTTGGACAGGGCACCAAATTGGAGATTAAG | |
| | VL2 | GACATCCAAATGACACAGTCCCCTAGCTCACTTTCAGCAAGCGTGGGGGACCGAGTTACTA | 679 |
| | | TCACATGCCGCGCAAGTGAGTCTGTGGACAACTATGGAATATCATTCATGAACTGGTTCCA | |
| | | GCAGAAACCTGGGAAAGCACCCAAGCTGCTTATCTACGCAGCAAGTAATCAGGGTAGTGGC | |
| | | GTCCCTTCTCGATTCAGTGGGAGCGGTAGCGGCACCGACTTCACCCTTACCATCTCATCAC | |
| | | TTCAACCCGATGATTTTGCTACCTACTATTGCCAGCAATCCAAGGAAGTTCCTTGGACCTT | |
| | | CGGGTGTGGGACAAAGGTAGAGATTAAA | |
| 33-6 | VH1 | CAGGTACAGCTTGTGCAATCTGGAGCTGAGGTCAAAAAACCAGGAAGTTCTGTAAAGGTGT | 686 |
| | | CTTGTAAGGCATCTGGTTACACATTTACCGATTACAACATGCATTGGGTACGTCAAGCCCC | |
| | | TGGCCAGGGCCTGGAATGGATCGGATATATATACCCCTACAACGGTGGAACAGGTTACAAC | |
| | | CAAAAATTCAAAAGCAAGGCTACTATCACTGCCGACGAGAGCACTAACACCGCTTACATGG | |
| | | AACTGTCTTCCTTGCGTTCAGAAGACACTGCCGTGTATTATTGTGCTCGGGGGCGACCCGC | |
| | | AATGGACTATTGGGGCCAAGGTACATTGGTGACTGTCAGTTCC | |
| | VH2 | GAGGTTCAGTTGGTTCAGTCAGGAGCAGAGGTCAAAAAACCTGGAAGCTCTGTCAAAGTTA | 676 |
| | | GTTGTAAGGCCAGTGGATACACCATAACCGATTCAAATATACATTGGGTTAGGCAAGCACC | |
| | | AGGACAGTGCTTGGAATGGATCGGGTACATCTATCCATATAATGGGGGCACCGATTACAAC | |
| | | CAAAAGTTTAAGAATCGCGCCACACTCACTGTTGATAATCCAACCAATACAGCATACATGG | |
| | | AGTTGAGCAGTCTTCGGTCCGAGGACACTGCTTTTTACTATTGTGTGAACGGTAACCCATG | |
| | | GTTGGCCTATTGGGGCCAAGGTACACTTGTAACAGTTTCATCT | |
| | VL1 | GACATCCAAATGACACAGTCCCCTAGCTCACTTTCAGCAAGCGTGGGGGACCGAGTTACTA | 687 |
| | | TCACATGCCGCGCAAGTGAGTCTGTGGACAACTATGGAATATCATTCATGAACTGGTTCCA | |
| | | GCAGAAACCTGGGAAAGCACCCAAGCTGCTTATCTACGCAGCAAGTAATCAGGGTAGTGGC | |
| | | GTCCCTTCTCGATTCAGTGGGAGCGGTAGCGGCACCGACTTCACCCTTACCATCTCATCAC | |
| | | TTCAACCCGATGATTTTGCTACCTACTATTGCCAGCAATCCAAGGAAGTTCCTTGGACCTT | |
| | | CGGGCAAGGGACAAAGGTAGAGATTAAA | |
| | VL2 | GATATACAACTGACTCAGAGTCCCAGCACTCTCAGTGCAAGTGTAGGCGATAGAGTAACTA | 677 |
| | | TAACCTGTCGCGCCTCAGAATCTCTTGATAATTATGGGATCCGATTTCTTACTTGGTTTCA | |
| | | GCAAAAGCCTGGTAAAGCTCCTAAATTGCTCATGTATGCCGCCAGTAATCAGGGTTCAGGA | |
| | | GTTCCTAGTCGTTTCTCTGGGTCAGGAAGCGGCACAGAATTTACCCTTACAATTTCCAGCC | |
| | | TCCAGCCCGACGATTTCGCCACTTACTATTGCCAACAAACTAAAGAGGTTCCTTGGAGTTT | |
| | | TGGGTGTGGCACCAAGGTAGAAGTAAAA | |
| 33-7 | VH1 | CAGGTACAGCTTGTGCAATCTGGAGCTGAGGTCAAAAAACCAGGAAGTTCTGTAAAGGTGT | 686 |
| | | CTTGTAAGGCATCTGGTTACACATTTACCGATTACAACATGCATTGGGTACGTCAAGCCCC | |
| | | TGGCCAGGGCCTGGAATGGATCGGATATATATACCCCTACAACGGTGGAACAGGTTACAAC | |
| | | CAAAAATTCAAAAGCAAGGCTACTATCACTGCCGACGAGAGCACTAACACCGCTTACATGG | |
| | | AACTGTCTTCCTTGCGTTCAGAAGACACTGCCGTGTATTATTGTGCTCGGGGGCGACCCGC | |
| | | AATGGACTATTGGGGCCAAGGTACATTGGTGACTGTCAGTTCC | |
| | VH2 | CAAGTCCAACTTCAGCAGCCTGGAGCTGAGGTAGTGAAACCCGGCGCATCTGTAAAAATGA | 680 |
| | | GCTGCAAAGCATCAGGTTACACATTTACATCCTACTACATCCATTGGATCAAGCAAACACC | |
| | | AGGCCAATGTCTTGAGTGGGTTGGCGTCATTTACCCAGGAAACGATGATATATCTTACAAT | |
| | | CAGAAATTTCAAGGGAAAGCCACACTTACAGCCGACAAGAGTTCCACAACTGCATATATGC | |
| | | AACTCTCCTCCCTGACATCTGAAGACAGTGCCGTATACTATTGTGCTCGTGAAGTCAGGCT | |
| | | CAGATACTTTGACGTGTGGGGTCAAGGCACAACCGTCACCGTCAGTAGC | |
| | VL1 | GACATCCAAATGACACAGTCCCCTAGCTCACTTTCAGCAAGCGTGGGGGACCGAGTTACTA | 687 |
| | | TCACATGCCGCGCAAGTGAGTCTGTGGACAACTATGGAATATCATTCATGAACTGGTTCCA | |
| | | GCAGAAACCTGGGAAAGCACCCAAGCTGCTTATCTACGCAGCAAGTAATCAGGGTAGTGGC | |
| | | GTCCCTTCTCGATTCAGTGGGAGCGGTAGCGGCACCGACTTCACCCTTACCATCTCATCAC | |
| | | TTCAACCCGATGATTTTGCTACCTACTATTGCCAGCAATCCAAGGAAGTTCCTTGGACCTT | |
| | | CGGGCAAGGGACAAAGGTAGAGATTAAA | |
| | VL2 | GAGATAGTCCTCACCCAATCACCAGGTAGTCTGGCTGTTAGCCCAGGTGAGCGAGTTACTA | 681 |
| | | TGTCTTGCAAGTCCTCTCAATCTGTGTTCTTTTCATCAAGTCAGAAGAATTATCTTGCCTG | |
| | | GTATCAGCAGATTCCTGGTCAATCTCCCCGACTGCTTATTTACTGGGCTTCAACTCGGGAG | |
| | | TCAGGGGTTCCCGACCGATTCACAGGGTCTGGGTCAGGAACTGACTTTACCCTTACTATCA | |
| | | GCTCTGTGCAGCCTGAAGACCTCGCAATATATTATTGTCATCAGTACCTCTCTTCTCGCAC | |
| | | TTTTGGATGTGGCACCAAATTGGAGATTAAG | |

[0392] Table 72 below shows the heavy chain and light chain CDR sequences of the engineered antibodies targeting CD33.

TABLE 72

| Name | CDR | Sequence | SEQ ID NO |
|---|---|---|---|
| 33-1 | CDR-H1 | DSNIH | 688 |
| | CDR-H2 | YIYTYNGGTDYNQKFKN | 689 |
| | CDR-H3 | GNPWLAY | 690 |
| | CDR-L1 | RASESLDNYGIRFLT | 691 |
| | CDR-L2 | AASNQGS | 692 |
| | CDR-L3 | QQTKEVTWS | 693 |
| 33-2 | CDR-H1 | DYNMH | 694 |
| | CDR-H2 | YIYPYNGGTGYNQKFKS | 695 |
| | CDR-H3 | GRPAMDY | 696 |
| | CDR-L1 | RASESVDNYGISFMN | 697 |
| | CDR-L2 | AASNQGS | 698 |
| | CDR-L3 | QQSKEVPWT | 699 |
| 33-3 | CDR-H1 | SYYIH | 700 |
| | CDR-H2 | VIYPGNDDISYNQKFQG | 701 |
| | CDR-H3 | EVRLRYFDV | 702 |
| | CDR-L1 | KSSQSVFFSSSQKNYLA | 703 |
| | CDR-L3 | WASTRES | 704 |
| | CDR-L3 | HQYLSSRT | 705 |
| 33-4 | V1 CDR-H1 | DSNIH | 688 |
| | V1 CDR-H2 | YIYPYNGGTDYNQKFKN | 689 |
| | V1 CDR-H3 | GNPWLAY | 690 |
| | V1 CDR-L1 | RASESLDNYGIRFLT | 691 |
| | V1 CDR-L2 | AASNQGS | 692 |
| | V1 CDR-L3 | QQTKEVPWS | 693 |
| | V2 CDR-H1 | DYNMH | 694 |
| | V2 CDR-H2 | YIYPYNGGTGYNQKFKS | 695 |
| | V2 CDR-H3 | GRPAMDY | 696 |
| | V2 CDR-L1 | RASESVDNYGISFMN | 697 |
| | V2 CDR-L2 | AASNQGS | 698 |
| | V2 CDR-L3 | QQSKEVPWT | 699 |
| 33-5 | V1 CDR-H1 | SYYIH | 700 |
| | V1 CDR-H2 | VIYTGNDDISYNQKFQG | 701 |
| | V1 CDR-H3 | EVRLRYFDV | 702 |
| | V1 CDR-L1 | KSSQSVFFSSSQKNYLA | 703 |
| | V1 CDR-L2 | WASTRES | 704 |
| | V1 CDR-L3 | HQYLSSRT | 705 |
| | V2 CDR-H1 | DYNMH | 694 |
| | V2 CDR-H2 | YIYPYNGGTGYNQKFKS | 695 |
| | V2 CDR-H3 | GRPAMDY | 696 |
| | V2 CDR-L1 | RASESVDNYGISFMN | 697 |
| | V2 CDR-L2 | AASNQGS | 698 |
| | V2 CDR-L3 | QQSKEVPWT | 699 |
| 33-6 | V1 CDR-H1 | DYNMH | 694 |
| | V1 CDR-H2 | YIYPYNGGTGYNQKFKS | 695 |
| | V1 CDR-H3 | GRPAMDY | 696 |
| | V1 CDR-L1 | RASESVDNYGISFMN | 697 |
| | V1 CDR-L2 | AASNQGS | 698 |
| | V1 CDR-L3 | QQSKEVPWT | 699 |
| | V2 CDR-H1 | DSNIH | 688 |
| | V2 CDR-H2 | YIYPYNGGTDYNQKFKN | 689 |
| | V2 CDR-H3 | GNPWLAY | 690 |
| | V2 CDR-L1 | RASESLDNYGIRFLT | 691 |
| | V2 CDR-L2 | AASNQGS | 692 |
| | V2 CDR-L3 | QQTKEVPWS | 693 |
| 33-7 | V1 CDR-H1 | DYNMH | 694 |
| | V1 CDR-H2 | YIYPYNGGTGYNQKFKS | 695 |
| | V1 CDR-H3 | GRPAMDY | 696 |
| | V1 CDR-L1 | RASESVDNYGISFMN | 697 |
| | V1 CDR-L2 | AASNQGS | 698 |
| | V1 CDR-L3 | QQSKEVPWT | 699 |
| | V2 CDR-H1 | DYNMH | 694 |
| | V2 CDR-H2 | YIYPYNGGTGYNQKFKS | 695 |
| | V2 CDR-H3 | GRPAMDY | 696 |
| | V2 CDR-L1 | RASESVDNYGISFMN | 697 |
| | V2 CDR-L2 | AASNQGS | 698 |
| | V2 CDR-L3 | QQSKEVPWT | 699 |

[0393] The CD33 protein binding constants of 33-1, 33-2, 33-3, 33-4, 33-5, 33-6, and 33-7 were determined using Octet Red96e (Sartorius). In order to analyze the binding constants of the seven antibodies, the human CD33 recombinant protein (Sino Biologicals, 12238-H08H) was loaded onto the Anti-Penta-HIS (HIS1K) biosensor (Sartorius, 18-5120). Then, the seven antibodies were added in a binding reaction (600 seconds) and a dissociation reaction (1,200 seconds) at various concentrations, and their affinities for CD33 were calculated (FIG. 50, Table 73). Table 73 below illustrates the binding constants of the engineered antibodies targeting CD33.

TABLE 73

| Antibodies | Antigen | Binding mode | K_{D} (nM) | Kₐ (1/Ms) | K_{d} (1/s) |
|---|---|---|---|---|---|
| 33-1 | rhCD33 | Monovalent | 1.7835 | 2.80E+05 | 4.99E−04 |
| 33-2 | rhCD33 | Monovalent | 5.5540 | 8.01E+05 | 4.45E−03 |
| 33-3 | rhCD33 | Monovalent | 0.5163 | 2.24E+05 | 1.16E−04 |
| 33-4 | rhCD33 | Biparatopic | 0.0851 | 2.79E+05 | 8.11E+02 |
| 33-5 | rhCD33 | Biparatopic | 0.0641 | 2.01E+05 | 4.07E+02 |
| 33-6 | rhCD33 | Biparatopic | 0.0772 | 3.60E+05 | 1.08E+03 |
| 33-7 | rhCD33 | Biparatopic | 0.1290 | 1.37E+05 | 1.24E+02 |

### Example 22. Design, Preparation and Analysis of Antibody Structure Targeting CEACAM5

[0394] The light chain and heavy chain variant polypeptide sequences of the antibodies that specifically bind to the CEACAM5 protein are shown in Table 74. For CEA01, expression vectors consisting of the sequences corresponding to Fc-Hole (SEQ ID NO: 7), CEA01 HC (SEQ ID NO: 590), and CEA01 LC (SEQ ID NO: 591) were co-transfected into EXPICHO-S™ (Gibco, A29127) (FIG. 41a, Table 74), and purification and analysis were performed in the same manner as described in Example 1. Expression, purification and analysis were performed for CEA02, CEA03, and CEA04 in the same manner as mentioned above (Table 74).

TABLE 74

| | | SEQ |
|---|---|---|
| Name | Sequence | ID NO |
| CEA01 HC | EVQLVESGGGVVQPGRSLRLSCSASGFDFTTYWMSWVRQAPGKCLEWIGEIHPDSSTIN | 706 |
| | YAPSLKDRFTISRDNAKNTLFLQMDSLRPEDTGVYFCASLYFGFPWFAYWGQGTPVTVS | |
| | SASTKGPSVFPLAPSSKSTSGGTAALGCLVKDYFPEPVTVSWNSGALTSGVHTFPAVLQ | |
| | SSGLYSLSSVVYVYSSSLGTQTYICNVNHKPSNTKVDKKVEPKSCDKTHTCPPCPAPEL | |
| | LGGPSVFLFPPKPKDTLMISRTPEVTCVVVDVSHEDPEVKFNWYVDGVEVHNAKTKPRE | |
| | EQYNSTYRVVSVLTVLHQDWLNGKEYKCKVSNKALPAPIEKTISKAKGQPREPQVYTLP | |
| | PCREEMTKNQVSLWCLVKGFYPSDIAVEWESNGQPENNYKTTPPVLDSDGSFFLYSKLY | |
| | VDKSRWQQGNVFSCSVMHEALHNHYTQKSLSLSPGK | |
| CEA01 LC | DIQLTQSPSSLSASVGDRVTITCKASQDVGTSVAWYQQKPGKAPKLLIYWTSTRHTGVT | 707 |
| | SRFSGSGSGTDFTFTISSLQPEDIATYYCQQYSLYRSFGCGTKVEIKRTVAAPSVFIFP | |
| | PSDEQLKSGTASVVCLLNNFYPREAKVQWKVDNALQSGNSQESVTEQDSKDSTYSLSST | |
| | LTLSKADYEKHKVYACEVTHQGLSSPVTKSFNRGECGGGGSGGGGSGGGGSEPKSSDKT | |
| | HTCPPCPAPELLGGPSVFLFPPKPKDTLMISRTPEVTCVVVDVSHEDPEVKFNWYVDGV | |
| | EVHNAKTKPREEQYNSTYRVVSVLTVLHQDWLNGKEYKCKVSNKALPAPIEKTISKAKG | |
| | QPREPQVYTLPPCREEMTKNQVSLWCLVKGFYPSDIAVEWESNGQPENNYKTTPPVLDS | |
| | DGSFFLYSKLTVDKSRWQQGNVFSCSVMHEALHNHYTQKSLSLSPGK | |
| CEA02 HC | EVQLVESGGGLVQPGRSLRLSCAASGFTVSSYWMHWVRQAPGKCLEWVGFILNKANGGT | 708 |
| | TEYAASVKGRFTISRDDSKNTLYLQMNSLRAEDTAVYYCARDRGLRFYFDYWGWGTTVT | |
| | VSSASTKGPSVFPLAPSSKSTSGGTAALGCLVKDYFPEPVTVSWNSGALTSGVHTFPAV | |
| | LQSSGLYSLSSVVTVPSSSLGTQTYICNVNHKPSNTKVDKKVEPKSCDKTHTCPPCPAP | |
| | ELLGGPSVFLFPPKPKDTLMISRTPEVTCVVVDVSHEDPEVKFNWYVDGVEVHNAKTKP | |
| | REEQYNSTYRVVSVLTVLHQDWLNGKEYKCKVSNKALPAPIEKTISKAKGQPREPQVYT | |
| | LPPCREEMTKNQVSLWCLVKGFYPSDIAVEWESNGQPENNYKTTPPVLDSDGSFFLYSK | |
| | LTVDKSRWQQGNVFSCSVMHEALHNHYTQKSLSLSPGK | |
| CEA02 LC | QAVLTQPASLSASPGASASLTCTLRRGINVGAYSIYWYQQKPGSPPQYLLRYKSDSDKQ | 709 |
| | QGAGVSSRFSASKDASANAGILLISGLQSEDEADYYCMIWHSGASAVFGCGTKLTVLGQ | |
| | PKAAPSVTLFPPSSEELQANKATLVCLISDFYPGAVTVAWKADSSPVKAGVETTTPSKQ | |
| | SNNKYAASSYLSLTPEQWKSHRSYSCQVTHEGSTVEKTVAPTECSGGGGSGGGGSGGGG | |
| | SEPKSSDKTHTCPPCPAPELLGGPSVFLFPPKPKDTLMISRTPEVTCVVVDVSHEDPEV | |
| | KFNWYVDGVEVHNAKTKPREEQYNSTYRVVSVLTVLHQDWLNGKEYKCKVSNKALPAPI | |
| | EKTISKAKGQPREPQVYTLPPCREEMTKNQVSLWCLVKGFYPSDIAVEWESNGQPENNY | |
| | KTTPPVLDSDGSFFLYSKLTVDKSRWQQGNVFSCSVMHEALHNHYTQKSLSLSPGK | |
| CEA03 HC | EVQLQQSGPGLVRPSQTLSLTCTASGFNIKDNYMHWVRQPPGRCLEWIGWIDPENGDTE | 710 |
| | YAPKFRGRVTMLADTSKNQFSLRLSSVTAADTAVYYCHVLIYAGYLAMDYWGQGTLVTV | |
| | SSASTKGPSVFPLAPSSKSTSGGTAALGCLVKDYFPEPVTVSWNSGALTSGVHTFPAVL | |
| | QSSGLYSLSSVVTVPSSSLGTQTYICNVNHKPSNTKVDKKVEPKSCDKTHTCPPCPAPE | |
| | LLGGPSVFLFPPKPKDTLMISRTPEVTCVVVDVSHEDPEVKFNWYVDGVEVHNAKTKPR | |
| | EEQYNSTYRVVSVLTVLHQDWLNGKEYKCKVSNKALPAPIEKTISKAKGQPREPQVYTL | |
| | PPCREEMTKNQVSLWCLVKGFYPSDIAVEWESNGQPENNYKTTPPVLDSDGSFFLYSKL | |
| | TVDKSRWQQGNVFSCVMHEALHNHYTQKSLSLSPGK | |
| CEA03 LC | DIQMTQSPSSLSASVGDRVTITCSASSSVTYMHWYQQKPGKAPKLWIYSTSNLASGVPS | 711 |
| | RFSGSGSGTDYTFTISSLQPEDIATYYCQQRSTYPLTFGCGTKLEIKRTVAAPSVFIFP | |
| | PSDEQLKSGTASVVCLLNNFYPREAKVQWKVDNALQSGNSQESVTEQDSKDSTYSLSST | |
| | LTLSKADYEKHKVYACEVTHQGLSSPVTKSFNRGECGGGGSGGGGSGGGGSEPKSSDKT | |
| | HTCPPCPAPELLGGPSVFLFPPKPKDTLMISRTPEVTCVVVDVSHEDPEVKFNWYVDGV | |
| | EVHNAKTKPREEQYNSTYRVVSVLTVLHQDWLNGKEYKCKVSNKALPAPIEKTISKAKG | |
| | QPREPQVYTLPPCREEMTKNQVSLWCLVKGFYPSDIAVEWESNGQPENNYKTTPPVLDS | |
| | DGSFFLYSKLTVDKSRWQQGNVFSCSVMHEALHNHTQKSLSLSPGK | |
| CEA04 HC | EVQLVESGGGLVQPGGSLRLSCAASGFNIKDTYMHWVRQAPGKCLEWVARIDPANGNSK | 712 |
| | YADSVKGRFTISADTSKNTAYLQMNSLRAEDTAVYYCAPFGYYVSDYAMAYWGQGTLVT | |
| | VSSASTKGPSVFPLAPSSKSTSGGTAALGCLVKDYFPEPVTVSWNSGALTSGVHTFPAV | |
| | LQSSGLYSLSSVVTVPSSSLGTQTYICNVNHKPSNTKVDKKVEPKSCDKTHTCPPCPAP | |
| | ELLGGPSVFLFPPKPKDTLMISRTPEVTCVVVDVSHEDPEVKFNWYVDGVEVHNAKTKP | |
| | REEQYNSTYRVVSVLTVLHQDWLNGKEYKCKVSNKALPAPIEKTISKAKGQPREPQVYT | |
| | LPPCREEMTKNQVSLWCLVKGFYPSDIAVEWESNGQPENNYKTTPPVLDSDGSFFLYSK | |
| | LTVDKSRWQQGNVFSCSVMHEALHNHYTQKSLSLSPGK | |
| CEA04 LC | DIQLTQSPSSLSASVGDRVTITCRAGESVDIFGVGFLHWYQQKPGKAPKLLIYRASNLE | 713 |
| | SGVPSRFSGSGSRTDFTLTISSLQPEDFATYYCQQTNEDPYTFGCGTKVEIKRTVAAPS | |
| | VFIFPPSDEQLKSGTASVVCLLNNFYPREAKVQWKVDNALQSGNSQESVTEQDSKDSTY | |
| | SLSSTLTLSKADYEKHKVYACEVTHQGLSSPVTKSFNRGECGGGGSGGGGSGGGGSEPK | |
| | SSDKTHTCPPCPAPELLGGPSVFLFPPKPKDTLMISRTPEVTCVVVDVSHEDPEVKFNW | |
| | YVDGVEVHNAKTKPREEQYNSTYRVVSVLTVLHQDWLNGKEYKCKVSNKALPAPIEKTI | |
| | SKAKGQPREPQVYTLPPCREEMTKNQVSLWCLVKGFYPSDIAVEWESNGQPENNYKTTP | |
| | PVLDSDGSFFLYSKLTVDKSRWQQGNVFSCSVMHEALHNHYTQKSLSLSPGK | |

[0395] Table 75 below shows the heavy chain and light chain nucleotide sequences of the engineered antibodies targeting CEACAM5.

TABLE 75

| | | SEQ |
|---|---|---|
| Name | Sequence | ID NO |
| CEA01 HC | GAAGTGCAACTCGTAGAATCCGGCGGGGGCGTCGTACAGCCCGGCCGTTCTTTGAGACT | 714 |
| | TAGCTGTAGTGCTTCTGGGTTTGACTTCACTACATACTGGATGTCATGGGTAAGACAGG | |
| | CACCTGGCAAGTGCCTTGAATGGATCGGTGAAATCCATCCCGACAGCTCCACAATCAAC | |
| | TACGCCCCAAGTTTGAAAGACCGGTTCACCATATCTCGTGACAACGCCAAGAATACATT | |
| | GTTCCTTCAGATGGATAGTCTTCGTCCAGAGGATACTGGGGTATATTTTTGTGCCAGCT | |
| | TGTATTTTGGCTTCCCCTGGTTCGCTTATTGGGGCCAAGGTACACCCGTCACTGTCTCT | |
| | TCTGCTAGCACCAAAGGACCTAGTGTTTTTGGTGTTGCCCCTTCCTCAAAGTCTACCTC | |
| | TGGGGGGACAGCCGCTCTGGGCTGCCTGGTCAAGGATTATTTCCCAGAGCCTGTCACTG | |
| | TCAGTTGGAACTCTGGAGCCTTGACTTCTGGTGTTCATACATTTCCTGCTGTCCTTCAA | |
| | AGCAGCGGCTTGTACTCATTGTCTTCTGTTGTGACAGTACCCTCAAGCAGCCTCGGCAC | |
| | TCAGACATACATCTGCAATGTCAACCACAAACCCTCAAATACAAAGGTAGATAAAAAAG | |
| | TCGAACCAAAGTCTTGTGACAAAACTCACACGTGCCCACCGTGCCCAGCACCTGAACTC | |
| | CTGGGGGGACCGTCAGTCTTCCTCTTCCCCCCAAAACCCAAGGACACCCTCATGATCTC | |
| | CCGGACCCCTGAGGTCACATGCGTGGTGGTGGACGTGAGCCACGAAGACCCTGAGGTCA | |
| | AGTTCAACTGGTACGTGGACGGCGTGGAGGTGCATAATGCCAAGACAAAGCCGCGGGAG | |
| | GAGCAGTACAACAGCACGTACCGTGTGGTCAGCGTCCTCACCGTCCTGCACCAGGACTG | |
| | GCTGAATGGCAAGGAGTACAAGTGCAAGGTCTCCAACAAAGCCCTCCCAGCCCCCATCG | |
| | AGAAAACCATCTCCAAAGCCAAAGGGCAGCCCCGAGAACCACAGGTGTACACCCTGCCC | |
| | CCATGCCGGGAGGAGATGACCAAGAACCAGGTCAGCCTGTGGTGCCTGGTCAAAGGCTT | |
| | CTATCCCAGCGACATCGCCGTGGAGTGGGAGAGCAATGGGCAGCCGGAGAACAACTACA | |
| | AGACCACGCCTCCCGTGCTGGACTCCGACGGCTCCTTCTTCCTCTACAGCAAGCTCACC | |
| | GTGGACAAGAGCAGGTGGCAGCAGGGGAACGTCTTCTCATGCTCCGTGATGCATGAGGC | |
| | TCTGCACAACCACTACACGCAGAAGAGCCTCTCCCTGTCTCCGGGTAAA | |
| CEA01 LC | GACATCCAACTTACCCAGTCACCCTCATCTCTTAGTGCCTCTGTAGGGGACCGAGTTAC | 715 |
| | TATTACATGTAAAGCCAGTCAAGATGTTGGCACCTCAGTAGCATGGTATCAACAAAAGC | |
| | CTGGTAAAGCCCCAAAACTGCTGATCTATTGGACAAGCACACGACATACAGGAGTGCCA | |
| | AGTCGCTTCAGCGGTTCAGGTTCAGGCACAGATTTTACATTCACTATATCAAGCCTGCA | |
| | ACCCGAGGACATTGCCACATATTACTGCCAGCAATATAGTCTGTATCGTAGCTTCGGAT | |
| | GTGGCACCAAGGTTGAAATTAAGCGTACGGTGGCAGCTCCCAGCGTTTTTATCTTTCCC | |
| | CCATCCGACGAGCAGCTCAAGAGTGGCACTGCCTCTGTAGTTTGTTTGCTGAATAACTT | |
| | CTATCCACGTGAAGCAAAAGTACAGTGGAAGGTCGATAATGCCCTTCAGAGCGGTAACA | |
| | GCCAAGAAAGTGTTACCGAGCAAGATTCCAAAGATTCCACTTACAGTCTGTCCAGCACA | |
| | TTGACACTGAGTAAGGCTGATTACGAAAAACACAAGGTGTACGCATGCGAGGTGACACA | |
| | CCAAGGTCTTTCATCTCCTGTAACTAAGAGCTTTAACCGGGGAGAATGTGGTGGTGGGG | |
| | GCAGCGGGGGCGGAGGTAGTGGAGGCGGCGGTAGTGAACCAAAGAGTAGTGACAAAACT | |
| | CACACGTGCCCACCGTGCCCAGCACCTGAACTCCTGGGGGGACCGTCAGTCTTCCTCTT | |
| | CCCCCCAAAACCCAAGGACACCCTCATGATCTCCCGGACCCCTGAGGTCACATGCGTGG | |
| | TGGTGGACGTGAGCCACGAAGACCCTGAGGTCAAGTTCAACTGGTACGTGGACGGCGTG | |
| | GAGGTGCATAATGCCAAGACAAAGCCGCGGGAGGAGCAGTACAACAGCACGTACCGTGT | |
| | GGTCAGCGTCCTCACCGTCCTGCACCAGGACTGGCTGAATGGCAAGGAGTACAAGTGCA | |
| | AGGTCTCCAACAAAGCCCTCCCAGCCCCCATCGAGAAAACCATCTCCAAAGCCAAAGGG | |
| | CAGCCCCGAGAACCACAGGTGTACACCCTGCCCCCATGCCGGGAGGAGATGACCAAGAA | |
| | CCAGGTCAGCCTGTGGTGCCTGGTCAAAGGCTTCTATCCCAGCGACATCGCCGTGGAGT | |
| | GGGAGAGCAATGGGCAGCCGGAGAACAACTACAAGACCACGCCTCCCGTGCTGGACTCC | |
| | GACGGCTCCTTCTTCCTCTACAGCAAGCTCACCGTGGACAAGAGCAGGTGGCAGCAGGG | |
| | GAACGTCTTCTCATGCTCCGTGATGCATGAGGCTCTGCACAACCACTACACGCAGAAGA | |
| | GCCTCTCCCTGTCTCCGGGTAAA | |
| CEA02 HC | GAAGTTCAACTGGTGGAGTCTGGCGGCGGACTTGTCCAGCCAGGGCGAAGCCTGCGTCT | 716 |
| | CTCATGCGCTGCCTCCGGTTTCACTGTTTCTTCATACTGGATGCACTGGGTAAGACAGG | |
| | CTCCTGGCAAGTGTCTTGAATGGGTGGGCTTCATTTTGAACAAGGCAAACGGCGGGACT | |
| | ACCGAATACGCTGCCAGCGTTAAGGGTCGATTCACCATCTCAAGGGATGATTCTAAAAA | |
| | CACATTGTACCTTCAGATGAACTCTCTGAGGGCCGAGGACACAGCAGTCTACTATTGCG | |
| | CTAGAGATAGGGGGCTTAGATTCTATTTTGACTACTGGGGGCAGGGAACAACTGTCACC | |
| | GTTTCCAGTGCTAGCACCAAAGGACCTAGTGTTTTTCCTCTTGCCCCTTCCTCAAAGTC | |
| | TACCTCTGGGGGGACAGCCGCTCTGGGCTGCCTGGTCAAGGATTATTTCCCAGAGCCTG | |
| | TCACTGTCAGTTGGAACTCTGGAGCCTTGACTTCTGGTGTTCATACATTTCCTGCTGTC | |
| | CTTCAAAGCAGCGGCTTGTACTCATTGTCTTCTGTTGTGACAGTACCCTCAAGCAGCCT | |
| | CGGCACTCAGACATACATCTGCAATGTCAACCACAAACCCTCAAATACAAAGGTAGATA | |
| | AAAAAGTCGAACCAAAGTCTTGTGACAAAACTCACACGTGCCCACCGTGCCCAGCACCT | |
| | GAACTCCTGGGGGGACCGTCAGTCTTCCTCTTCCCCCCAAAACCCAAGGACACCCTCAT | |
| | GATCTCCCGGACCCCTGAGGTCACATGCGTGGTGGTGGACGTGAGCCACGAAGACCCTG | |
| | AGGTCAAGTTCAACTGGTACGTGGACGGCGTGGAGGTGCATAATGCCAAGACAAAGCCG | |
| | CGGGAGGAGCAGTACAACAGCACGTACCGTGTGGTCAGCGTCCTCACCGTCCTGCACCA | |
| | GGACTGGCTGAATGGCAAGGAGTACAAGTGCAAGGTCTCCAACAAAGCCCTCCCAGCCC | |
| | CCATCGAGAAAACCATCTCCAAAGCCAAAGGGCAGCCCCGAGAACCACAGGTGTACACC | |
| | CTGCCCCCATGCCGGGAGGAGATGACCAAGAACCAGGTCAGCCTGTGGTGCCTGGTCAA | |
| | AGGCTTCTATCCCAGCGACATCGCCGTGGAGTGGGAGAGCAATGGGCAGCCGGAGAACA | |
| | ACTACAAGACCACGCCTCCCGTGCTGGACTCCGACGGCTCCTTCTTCCTCTACAGCAAG | |
| | CTCACCGTGGACAAGAGCAGGTGGCAGCAGGGGAACGTCTTCTCATGCTCCGTGATGCA | |
| | TGAGGCTCTGCACAACCACTACACGCAGAAGAGCCTCTCCCTGTCTCCGGGTAAA | |
| CEA02 LC | CAGGCAGTGCTTACTCAGCCTGCTTCACTCTCTGCCTCACCAGGAGCATCTGCAAGCCT | 717 |
| | CACCTGCACATTGCGTCGAGGTATAAACGTAGGCGCTTACTCAATTTACTGGTACCAGC | |
| | AGAAACCTGGGAGCCCACCTCAATACCTCCTCCGATACAAGAGCGATTCTGATAAGCAA | |
| | CAGGGCAGTGGTGTATCCAGCAGATTTTCCGCCAGCAAGGATGCAAGCGCTAATGCAGG | |
| | TATTCTTCTCATTTCAGGCTTGCAAAGCGAGGACGAAGCAGACTACTACTGCATGATTT | |
| | GGCACTCCGGTGCCTCCGCAGTTTTTGGCTGCGGAACAAAGCTTACAGTCCTTGGTCAG | |
| | CCCAAGGCTGCCCCCTCGGTCACTCTGTTCCCGCCCTCCTCTGAGGAGCTTCAAGCCAA | |
| | CAAGGCCACACTGGTGTGTCTCATAAGTGACTTCTACCCGGGAGCCGTGACAGTGGCCT | |
| | GGAAGGCAGATAGCAGCCCCGTCAAGGCGGGAGTGGAGACCACCACACCCTCCAAACAA | |
| | AGCAACAACAAGTACGCGGCCAGCAGCTATCTGAGCCTGACGCCTGAGCAGTGGAAGTC | |
| | CCACAGAAGCTACAGCTGCCAGGTCACGCATGAAGGGAGCACCGTGGAGAAGACAGTGG | |
| | CCCCTACAGAATGTTCAGGTGGTGGGGGCAGCGGGGGCGGAGGTAGTGGAGGCGGCGGT | |
| | AGTGAACCAAAGAGTAGTGACAAAACTCACACGTGCCCACCGTGCCCAGCACCTGAACT | |
| | CCTGGGGGGACCGTCAGTCTTCCTCTTCCCCCCAAAACCCAAGGACACCCTCATGATCT | |
| | CCCGGACCCCTGAGGTCACATGCGTGGTGGTGGACGTGAGCCACGAAGACCCTGAGGTC | |
| | AAGTTCAACTGGTACGTGGACGGCGTGGAGGTGCATAATGCCAAGACAAAGCCGCGGGA | |
| | GGAGCAGTACAACAGCACGTACCGTGTGGTCAGCGTCCTCACCGTCCTGCACCAGGACT | |
| | GGCTGAATGGCAAGGAGTACAAGTGCAAGGTCTCCAACAAAGCCCTCCCAGCCCCCATC | |
| | GAGAAAACCATCTCCAAAGCCAAAGGGCAGCCCCGAGAACCACAGGTGTACACCCTGCC | |
| | CCCATGCCGGGAGGAGATGACCAAGAACCAGGTCAGCCTGTGGTGCCTGGTCAAAGGCT | |
| | TCTATCCCAGCGACATCGCCGTGGAGTGGGAGAGCAATGGGCAGCCGGAGAACAACTAC | |
| | AAGACCACGCCTCCCGTGCTGGACTCCGACGGCTCCTTCTTCCTCTACAGCAAGCTCAC | |
| | CGTGGACAAGAGCAGGTGGCAGCAGGGGAACGTCTTCTCATGCTCCGTGATGCATGAGG | |
| | CTCTGCACAACCACTACACGCAGAAGAGCCTCTCCCTGTCTCCGGGTAAA | |
| CEA03 HC | GAGGTACAACTGCAGCAAAGCGGTCCAGGCCTTGTTCGGCCTAGCCAGACTCTGTCACT | 718 |
| | GACCTGTACCGCAAGCGGTTTCAATATCAAGGACAACTATATGCACTGGGTCCGCCAGC | |
| | CTCCAGGACGCTGTTTGGAGTGGATAGGATGGATAGACCCAGAAAATGGGGATACCGAA | |
| | TACGCTCCAAAATTTCGTGGACGAGTTACCATGCTGGCCGATACATCCAAAAACCAGTT | |
| | TTCTCTGAGGCTCTCCAGCGTGACAGCCGCAGATACCGCCGTATATTACTGTCATGTGT | |
| | TGATCTATGCCGGGTATCTTGCAATGGATTACTGGGGACAGGGCACTCTCGTAACAGTC | |
| | TCTTCAGCTAGCACCAAAGGACCTAGTGTTTTTCCTCTTGCCCCTTCCTCAAAGTCTAC | |
| | CTCTGGGGGGACAGCCGCTCTGGGCTGCCTGGTCAAGGATTATTTCCCAGAGCCTGTCA | |
| | CTGTCAGTTGGAACTCTGGAGCCTTGACTTCTGGTGTTCATACATTTCCTGCTGTCCTT | |
| | CAAAGCAGCGGCTTGTACTCATTGTCTTCTGTTGTGACAGTACCCTCAAGCAGCCTCGG | |
| | CACTCAGACATACATCTGCAATGTCAACCACAAACCCTCAAATACAAAGGTAGATAAAA | |
| | AAGTCGAACCAAAGTCTTGTGACAAAACTCACACGTGCCCACCGTGCCCAGCACCTGAA | |
| | CTCCTGGGGGGACCGTCAGTCTTCCTCTTCCCCCCAAAACCCAAGGACACCCTCATGAT | |
| | CTCCCGGACCCCTGAGGTCACATGCGTGGTGGTGGACGTGAGCCACGAAGACCCTGAGG | |
| | TCAAGTTCAACTGGTACGTGGACGGCGTGGAGGTGCATAATGCCAAGACAAAGCCGCGG | |
| | GAGGAGCAGTACAACAGCACGTACCGTGTGGTCAGCGTCCTCACCGTCCTGCACCAGGA | |
| | CTGGCTGAATGGCAAGGAGTACAAGTGCAAGGTCTCCAACAAAGCCCTCCCAGCCCCCA | |
| | TCGAGAAAACCATCTCCAAAGCCAAAGGGCAGCCCCGAGAACCACAGGTGTACACCCTG | |
| | CCCCCATGCCGGGAGGAGATGACCAAGAACCAGGTCAGCCTGTGGTGCCTGGTCAAAGG | |
| | CTTCTATCCCAGCGACATCGCCGTGGAGTGGGAGAGCAATGGGCAGCCGGAGAACAACT | |
| | ACAAGACCACGCCTCCCGTGCTGGACTCCGACGGCTCCTTCTTCCTCTACAGCAAGCTC | |
| | ACCGTGGACAAGAGCAGGTGGCAGCAGGGGAACGTCTTCTCATGCTCCGTGATGCATGA | |
| | GGCTCTGCACAACCACTACACGCAGAAGAGCCTCTCCCTGTCTCCGGGTAAA | |
| CEA03 LC | GACATACAAATGACCCAAAGCCCAAGCTCATTGAGCGCCTCCGTAGGAGATCGCGTAAC | 719 |
| | AATAACCTGCAGCGCCAGCAGTTCAGTAACTTATATGCACTGGTATCAGCAGAAGCCAG | |
| | GTAAGGCTCCCAAACTGTGGATATATAGCACCAGCAACCTGGCATCTGGTGTACCCTCT | |
| | CGATTTAGTGGCAGTGGTTCTGGAACAGACTATACCTTCACTATATCTTCTCTTCAGCC | |
| | TGAGGATATAGCCACTTACTATTGCCAGCAACGTTCCACTTACCCCCTGACTTTTGGGT | |
| | GTGGTACAAAGTTGGAAATAAAGCGTACGGTGGCAGCTCCCAGCGTTTTTATCTTTCCC | |
| | CCATCCGACGAGCAGCTCAAGAGTGGCACTGCCTCTGTAGTTTGTTTGCTGAATAACTT | |
| | CTATCCACGTGAAGCAAAAGTACAGTGGAAGGTCGATAATGCCCTTCAGAGCGGTAACA | |
| | GCCAAGAAAGTGTTACCGAGCAAGATTCCAAAGATTCCACTTACAGTCTGTCCAGCACA | |
| | TTGACACTGAGTAAGGCTGATTACGAAAAACACAAGGTGTACGCATGCGAGGTGACACA | |
| | CCAAGGTCTTTCATCTCCTGTAACTAAGAGCTTTAACCGGGGAGAATGTGGTGGTGGGG | |
| | GCAGCGGGGGCGGAGGTAGTGGAGGCGGCGGTAGTGAACCAAAGAGTAGTGACAAAACT | |
| | CACACGTGCCCACCGTGCCCAGCACCTGAACTCCTGGGGGGACCGTCAGTCTTCCTCTT | |
| | CCCCCCAAAACCCAAGGACACCCTCATGATCTCCCGGACCCCTGAGGTCACATGCGTGG | |
| | TGGTGGACGTGAGCCACGAAGACCCTGAGGTCAAGTTCAACTGGTACGTGGACGGCGTG | |
| | GAGGTGCATAATGCCAAGACAAAGCCGCGGGAGGAGCAGTACAACAGCACGTACCGTGT | |
| | GGTCAGCGTCCTCACCGTCCTGCACCAGGACTGGCTGAATGGCAAGGAGTACAAGTGCA | |
| | AGGTCTCCAACAAAGCCCTCCCAGCCCCCATCGAGAAAACCATCTCCAAAGCCAAAGGG | |
| | CAGCCCCGAGAACCACAGGTGTACACCCTGCCCCCATGCCGGGAGGAGATGACCAAGAA | |
| | CCAGGTCAGCCTGTGGTGCCTGGTCAAAGGCTTCTATCCCAGCGACATCGCCGTGGAGT | |
| | GGGAGAGCAATGGGCAGCCGGAGAACAACTACAAGACCACGCCTCCCGTGCTGGACTCC | |
| | GACGGCTCCTTCTTCCTCTACAGCAAGCTCACCGTGGACAAGAGCAGGTGGCAGCAGGG | |
| | GAACGTCTTCTCATGCTCCGTGATGCATGAGGCTCTGCACAACCACTACACGCAGAAGA | |
| | GCCTCTCCCTGTCTCCGGGTAAA | |
| CEA04 HC | GAAGTGCAGTTGGTGGAGTCTGGGGGCGGGTTGGTCCAACCAGGAGGCTCTCTGCGACT | 720 |
| | CTCTTGCGCAGCATCAGGCTTCAACATAAAGGACACATATATGCACTGGGTTCGGCAGG | |
| | CTCCCGGAAAATGTCTTGAATGGGTCGCCCGAATTGATCCTGCAAATGGGAACAGTAAA | |
| | TACGCAGATTCAGTTAAAGGCCGCTTCACTATCAGCGCAGATACATCCAAAAACACCGC | |
| | ATACCTTCAGATGAACTCACTCCGTGCAGAAGACACTGCAGTCTACTATTGCGCTCCCT | |
| | TCGGTTACTACGTCTCTGACTATGCAATGGCTTACTGGGGCCAAGGAACCTTGGTGACT | |
| | GTATCTTCTGCTAGCACCAAAGGACCTAGTGTTTTTCCTCTTGCCCCTTCCTCAAAGTC | |
| | TACCTCTGGGGGGACAGCCGCTCTGGGCTGCCTGGTCAAGGATTATTTCCCAGAGCCTG | |
| | TCACTGTCAGTTGGAACTCTGGAGCCTTGACTTCTGGTGTTCATACATTTCCTGCTGTC | |
| | CTTCAAAGCAGCGGCTTGTACTCATTGTCTTCTGTTGTGACAGTACCCTCAAGCAGCCT | |
| | CGGCACTCAGACATACATCTGCAATGTCAACCACAAACCCTCAAATACAAAGGTAGATA | |
| | AAAAAGTCGAACCAAAGTCTTGTGACAAAACTCACACGTGCCCACCGTGCCCAGCACCT | |
| | GAACTCCTGGGGGGACCGTCAGTCTTCCTCTTCCCCCCAAAACCCAAGGACACCCTCAT | |
| | GATCTCCCGGACCCCTGAGGTCACATGCGTGGTGGTGGACGTGAGCCACGAAGACCCTG | |
| | AGGTCAAGTTCAACTGGTACGTGGACGGCGTGGAGGTGCATAATGCCAAGACAAAGCCG | |
| | CGGGAGGAGCAGTACAACAGCACGTACCGTGTGGTCAGCGTCCTCACCGTCCTGCACCA | |
| | GGACTGGCTGAATGGCAAGGAGTACAAGTGCAAGGTCTCCAACAAAGCCCTCCCAGCCC | |
| | CCATCGAGAAAACCATCTCCAAAGCCAAAGGGCAGCCCCGAGAACCACAGGTGTACACC | |
| | CTGCCCCCATGCCGGGAGGAGATGACCAAGAACCAGGTCAGCCTGTGGTGCCTGGTCAA | |
| | AGGCTTCTATCCCAGCGACATCGCCGTGGAGTGGGAGAGCAATGGGCAGCCGGAGAACA | |
| | ACTACAAGACCACGCCTCCCGTGCTGGACTCCGACGGCTCCTTCTTCCTCTACAGCAAG | |
| | CTCACCGTGGACAAGAGCAGGTGGCAGCAGGGGAACGTCTTCTCATGCTCCGTGATGCA | |
| | TGAGGCTCTGCACAACCACTACACGCAGAAGAGCCTCTCCCTGTCTCCGGGTAAA | |
| CEA04 LC | GATATACAGCTTACACAATCACCCTCCTCCCTGTCTGCCTCCGTAGGAGATAGAGTAAC | 721 |
| | AATCACATGCAGAGCTGGCGAGAGTGTTGATATATTCGGTGTTGGATTTTTGCACTGGT | |
| | ACCAACAGAAACCAGGGAAAGCACCTAAGCTCTTGATTTATAGAGCTTCTAACCTTGAG | |
| | AGCGGGGTGCCTAGTAGGTTTTCTGGGTCAGGAAGTCGGACCGATTTTACTCTCACAAT | |
| | TTCATCCCTTCAGCCCGAAGACTTTGCAACCTACTACTGTCAGCAGACAAACGAAGACC | |
| | CCTATACATTCGGATGTGGTACAAAGGTGGAGATTAAACGTACGGTGGCAGCTCCCAGC | |
| | GTTTTTATCTTTCCCCCATCCGACGAGCAGCTCAAGAGTGGCACTGCCTCTGTAGTTTG | |
| | TTTGCTGAATAACTTCTATCCACGTGAAGCAAAAGTACAGTGGAAGGTCGATAATGCCC | |
| | TTCAGAGCGGTAACAGCCAAGAAAGTGTTACCGAGCAAGATTCCAAAGATTCCACTTAC | |
| | AGTCTGTCCAGCACATTGACACTGAGTAAGGCTGATTACGAAAAACACAAGGTGTACGC | |
| | ATGCGAGGTGACACACCAAGGTCTTTCATCTCCTGTAACTAAGAGCTTTAACCGGGGAG | |
| | AATGTGGTGGTGGGGGCAGCGGGGGCGGAGGTAGTGGAGGCGGCGGTAGTGAACCAAAG | |
| | AGTAGTGACAAAACTCACACGTGCCCACCGTGCCCAGCACCTGAACTCCTGGGGGGACC | |
| | GTCAGTCTTCCTCTTCCCCCCAAAACCCAAGGACACCCTCATGATCTCCCGGACCCCTG | |
| | AGGTCACATGCGTGGTGGTGGACGTGAGCCACGAAGACCCTGAGGTCAAGTTCAACTGG | |
| | TACGTGGACGGCGTGGAGGTGCATAATGCCAAGACAAAGCCGCGGGAGGAGCAGTACAA | |
| | CAGCACGTACCGTGTGGTCAGCGTCCTCACCGTCCTGCACCAGGACTGGCTGAATGGCA | |
| | AGGAGTACAAGTGCAAGGTCTCCAACAAAGCCCTCCCAGCCCCCATCGAGAAAACCATC | |
| | TCCAAAGCCAAAGGGCAGCCCCGAGAACCACAGGTGTACACCCTGCCCCCATGCCGGGA | |
| | GGAGATGACCAAGAACCAGGTCAGCCTGTGGTGCCTGGTCAAAGGCTTCTATCCCAGCG | |
| | ACATCGCCGTGGAGTGGGAGAGCAATGGGCAGCCGGAGAACAACTACAAGACCACGCCT | |
| | CCCGTGCTGGACTCCGACGGCTCCTTCTTCCTCTACAGCAAGCTCACCGTGGACAAGAG | |
| | CAGGTGGCAGCAGGGGAACGTCTTCTCATGCTCCGTGATGCATGAGGCTCTGCACAACC | |
| | ACTACACGCAGAAGAGCCTCTCCCTGTCTCCGGGTAAA | |

[0396] Table 76 below shows the polypeptide sequences of the heavy chain variable region (VH) and light chain variable region (VL) of the engineered antibodies targeting CEACAM5. Table 77 below shows the nucleotide sequences of the heavy chain variable region (VH) and light chain variable region (VL) of the engineered antibodies targeting CEACAM5.

TABLE 76

| | | | SEQ |
|---|---|---|---|
| Name | | Sequence | ID NO |
| CEA01 | VH | EVQLVESGGGVVQPGRSLRLSCSASGFDFTTYW | 819 |
| | | MSWVRQAPGKCLEWIGEIHPDSSTINYAPSLKD | |
| | | RFTISRDNAKNTLFLQMDSLRPEDTGVYFCASL | |
| | | YFGFPWFAYWGQGTPVTVSS | |
| | VL | DIQLTQSPSSLSASVGDRVTITCKASQDVGTSV | 820 |
| | | AWYQQKPGKAPKLLIYWTSTRHTGVPSRFSGSG | |
| | | SGTDFTFTISSLQPEDIATYYCQQYSLYRSFGC | |
| | | GTKVEIK | |
| CEA02 | VH | EVQLVESGGGLVQPGRSLRLSCAASGFTVSSYW | 821 |
| | | MHWVRQAPGKCLEWVGFILNKANGGTTEYAASV | |
| | | KGRFTISRDDSKNTLYLQMNSLRAEDTAVYYCA | |
| | | RDRGLRFYFDYWGQGTTVTVSS | |
| | VL | QAVLTQPASLSASPGASASLTCTLRRGINVGAY | 822 |
| | | SIYWYQQKPGSPPQYLLRYKSDSDKQQGSGVSS | |
| | | RFSASKDASANAGILLISGLQSEDEADYYCMIW | |
| | | HSGASAVFGCGTKLTVL | |
| CEA03 | VH | EVQLQQSGPGLVRPSQTLSLTCTASGFNIKDNY | 823 |
| | | MHWVRQPPGRCLEWIGWIDPENGDTEYAPKFRG | |
| | | RVTMLADTSKNQFSLRLSSVTAADTAVYYCHVL | |
| | | IYAGYLAMDYWGQGTLVTVSS | |
| | VL | DIQMTQSPSSLSASVGDRVTITCSASSSVTYMH | 824 |
| | | WYQQKPGKAPKLWIYSTSNLASGVPSRFSGSGS | |
| | | GTDYTFTISSLQPEDIATYYCQQRSTYPLTFGC | |
| | | GTKLEIK | |
| CEA04 | VH | EVQLVESGGGLVQPGGSLRLSCAASGFNIKDTY | 825 |
| | | MHWVRQAPGKCLEWVARIDPANGNSKYADSVKG | |
| | | RFTISADTSKNTAYLQMNSLRAEDTAVYYCAPF | |
| | | GYYVSDYAMAYWGQGTLVTVSS | |
| | VL | DIQLTQSPSSLSASVGDRVTITCRAGESVDIFG | 826 |
| | | VGFLHWYQQKPGKAPKLLIYRASNLESGVPSRF | |
| | | SGSGSRTDFTLTISSLQPEDFATYYCQQTNEDP | |
| | | YTFGCGTKVEIK | |

TABLE 77

| | | | SEQ |
|---|---|---|---|
| Name | | Sequence | ID NO |
| CEA01 | VH | GAAGTGCAACTCGTAGAATCCGGCGGGGGCGTCGTACAGCCCGGC | 827 |
| | | CGTTCTTTGAGACTTAGCTGTAGTGCTTCTGGGTTTGACTTCACTAC | |
| | | ATACTGGATGTCATGGGTAAGACAGGCACCTGGCAAGTGCCTTGA | |
| | | ATGGATCGGTGAAATCCATCCCGACAGCTCCACAATCAACTACGC | |
| | | CCCAAGTTTGAAAGACCGGTTCACCATATCTCGTGACAACGCCAA | |
| | | GAATACATTGTTCCTTCAGATGGATAGTCTTCGTCCAGAGGATACT | |
| | | GGGGTATATTTTTGTGCCAGCTTGTATTTTGGCTTCCCCTGGTTCGC | |
| | | TTATTGGGGCCAAGGTACACCCGTCACTGTCTCTTCT | |
| | VL | GACATCCAACTTACCCAGTCACCCTCATCTCTTAGTGCCTCTGTAG | 722 |
| | | GGGACCGAGTTACTATTACATGTAAAGCCAGTCAAGATGTTGGCA | |
| | | CCTCAGTAGCATGGTATCAACAAAAGCCTGGTAAAGCCCCAAAAC | |
| | | TGCTGATCTATTGGACAAGCACACGACATACAGGAGTGCCAAGTC | |
| | | GCTTCAGCGGTTCAGGTTCAGGCACAGATTTTACATTCACTATATC | |
| | | AAGCCTGCAACCCGAGGACATTGCCACATATTACTGCCAGCAATA | |
| | | TAGTCTGTATCGTAGCTTCGGATGTGGCACCAAGGTTGAAATTAAG | |
| CEA02 | VH | GAAGTTCAACTGGTGGAGTCTGGCGGCGGACTTGTCCAGCCAGGG | 723 |
| | | CGAAGCCTGCGTCTCTCATGCGCTGCCTCCGGTTTCACTGTTTCTTC | |
| | | ATACTGGATGCACTGGGTAAGACAGGCTCCTGGCAAGTGTCTTGA | |
| | | ATGGGTGGGCTTCATTTTGAACAAGGCAAACGGCGGGACTACCGA | |
| | | ATACGCTGCCAGCGTTAAGGGTCGATTCACCATCTCAAGGGATGAT | |
| | | TCTAAAAACACATTGTACCTTCAGATGAACTCTCTGAGGGCCGAGG | |
| | | ACACAGCAGTCTACTATTGCGCTAGAGATAGGGGGCTTAGATTCTA | |
| | | TTTTGACTACTGGGGGCAGGGAACAACTGTCACCGTTTCCAGT | |
| | VL | CAGGCAGTGCTTACTCAGCCTGCTTCACTCTCTGCCTCACCAGGAG | 724 |
| | | CATCTGCAAGCCTCACCTGCACATTGCGTCGAGGTATAAACGTAGG | |
| | | CGCTTACTCAATTTACTGGTACCAGCAGAAACCTGGGAGCCCACCT | |
| | | CAATACCTCCTCCGATACAAGAGCGATTCTGATAAGCAACAGGGC | |
| | | AGTGGTGTATCCAGCAGATTTTCCGCCAGCAAGGATGCAAGCGCT | |
| | | AATGCAGGTATTCTTCTCATTTCAGGCTTGCAAAGCGAGGACGAAG | |
| | | CAGACTACTACTGCATGATTTGGCACTCCGGTGCCTCCGCAGTTTT | |
| | | TGGCTGCGGAACAAAGCTTACAGTCCTT | |
| CEA03 | VH | GAGGTACAACTGCAGCAAAGCGGTCCAGGCCTTGTTCGGCCTAGC | 725 |
| | | CAGACTCTGTCACTGACCTGTACCGCAAGCGGTTTCAATATCAAGG | |
| | | ACAACTATATGCACTGGGTCCGCCAGCCTCCAGGACGCTGTTTGGA | |
| | | GTGGATAGGATGGATAGACCCAGAAAATGGGGATACCGAATACGC | |
| | | TCCAAAATTTCGTGGACGAGTTACCATGCTGGCCGATACATCCAAA | |
| | | AACCAGTTTTCTCTGAGGCTCTCCAGCGTGACAGCCGCAGATACCG | |
| | | CCGTATATTACTGTCATGTGTTGATCTATGCCGGGTATCTTGCAAT | |
| | | GGATTACTGGGGACAGGGCACTCTCGTAACAGTCTCTTCA | |
| | VL | GACATACAAATGACCCAAAGCCCAAGCTCATTGAGCGCCTCCGTA | 726 |
| | | GGAGATCGCGTAACAATAACCTGCAGCGCCAGCAGTTCAGTAACT | |
| | | TATATGCACTGGTATCAGCAGAAGCCAGGTAAGGCTCCCAAACTG | |
| | | TGGATATATAGCACCAGCAACCTGGCATCTGGTGTACCCTCTCGAT | |
| | | TTAGTGGCAGTGGTTCTGGAACAGACTATACCTTCACTATATCTTC | |
| | | TCTTCAGCCTGAGGATATAGCCACTTACTATTGCCAGCAACGTTCC | |
| | | ACTTACCCCCTGACTTTTGGGTGTGGTACAAAGTTGGAAATAAAG | |
| CEA04 | VH | GAAGTGCAGTTGGTGGAGTCTGGGGGCGGGTTGGTCCAACCAGGA | 727 |
| | | GGCTCTCTGCGACTCTCTTGCGCAGCATCAGGCTTCAACATAAAGG | |
| | | ACACATATATGCACTGGGTTCGGCAGGCTCCCGGAAAATGTCTTGA | |
| | | ATGGGTCGCCCGAATTGATCCTGCAAATGGGAACAGTAAATACGC | |
| | | AGATTCAGTTAAAGGCCGCTTCACTATCAGCGCAGATACATCCAA | |
| | | AAACACCGCATACCTTCAGATGAACTCACTCCGTGCAGAAGACAC | |
| | | TGCAGTCTACTATTGCGCTCCCTTCGGTTACTACGTCTCTGACTATG | |
| | | CAATGGCTTACTGGGGCCAAGGAACCTTGGTGACTGTATCTTCT | |
| | VL | GATATACAGCTTACACAATCACCCTCCTCCCTGTCTGCCTCCGTAG | 728 |
| | | GAGATAGAGTAACAATCACATGCAGAGCTGGCGAGAGTGTTGATA | |
| | | TATTCGGTGTTGGATTTTTGCACTGGTACCAACAGAAACCAGGGAA | |
| | | AGCACCTAAGCTCTTGATTTATAGAGCTTCTAACCTTGAGAGCGGG | |
| | | GTGCCTAGTAGGTTTTCTGGGTCAGGAAGTCGGACCGATTTTACTC | |
| | | TCACAATTTCATCCCTTCAGCCCGAAGACTTTGCAACCTACTACTG | |
| | | TCAGCAGACAAACGAAGACCCCTATACATTCGGATGTGGTACAAA | |
| | | GGTGGAGATTAAA | |

[0397] Table 78 below shows the heavy chain and light chain CDR sequences of the engineered antibodies targeting CEACAM5.

TABLE 78

| Name | CDR | Sequence | SEQ ID NO |
|---|---|---|---|
| CEA01 | CDR-H1 | TYWMS | 729 |
| | CDR-H2 | EIHPDSSTINYAPSLKD | 730 |
| | CDR-H3 | LYFGFPWFAY | 731 |
| | CDR-L1 | KASQDVGTSVA | 732 |
| | CDR-L2 | WTSTRHT | 733 |
| | CDR-L3 | QQYSLYRS | 734 |
| CEA02 | CDR-H1 | SYWMH | 735 |
| | CDR-H2 | FILNKANGGTTEYAASVKG | 736 |
| | CDR-H3 | DRGLRFYFDY | 737 |
| | CDR-L1 | TLRRGINVGAYSIY | 738 |
| | CDR-L2 | SDKQQGS | 739 |
| | CDR-L3 | MIWHSGASAV | 740 |
| CEA03 | CDR-H1 | DNYMH | 741 |
| | CDR-H2 | WIDPENGDTEYAPKFRG | 742 |
| | CDR-H3 | LIYAGYLAMDY | 743 |
| | CDR-L1 | SASSSVTYMH | 744 |
| | CDR-L2 | STSNLAS | 745 |
| | CDR-L3 | QQRSTYPLT | 746 |
| CEA04 | CDR-H1 | DTYMH | 747 |
| | CDR-H2 | RIDPANGNSKYADSVKG | 748 |
| | CDR-H3 | FGYYVSDYAMAY | 749 |
| | CDR-L1 | RAGESVDIFGVGFLH | 750 |
| | CDR-L2 | RASNLES | 751 |
| | CDR-L3 | QQTNEDPYT | 752 |

[0398] In order to analyze the binding constants, the human CEACAM5 recombinant protein (Sino Biologicals, 11077-H08H) was loaded onto the Anti-Penta-HIS (HIS1K) biosensor (Sartorius, 18-5120). Then, the antibodies were added in a binding reaction (600 seconds) and a dissociation reaction (1,200 seconds) at various concentrations, and their affinities for human CEACAM5 were calculated (FIG. 51, Table 79). Table 79 below illustrates the binding constants of the engineered antibodies targeting human CEACAM5.

TABLE 79

| Antibodies | K_{D} (nM) | Kₐ (1/Ms) | K_{d} (1/s) |
|---|---|---|---|
| CEA01 | 1.5740 | 1.76E+05 | 2.78E−04 |
| CEA02 | 19.2395 | 2.03E+04 | 3.90E−04 |
| CEA03 | 274.7780 | 1.13E+04 | 3.09E−03 |
| CEA04 | 1.7856 | 2.05E+05 | 3.66E−04 |

### Example 23. Design, Preparation and Analysis of Antibody Structure Targeting TROP2, Mesothelin or LIV-1

[0399] The variant light chain and heavy chain polypeptide sequences of the antibody T01 that specifically binds to the TROP2 protein are shown in Table 80. For T01I, expression vectors consisting of the sequences corresponding to Fc-Hole (SEQ ID NO: 7), T01 HC (SEQ ID NO: 753), and T01 LC (SEQ ID NO: 754) were co-transfected into EXPICHO-S™ (Gibco, A29127) (FIG. 41a, Table 80), and purification and analysis were performed in the same manner as described in Example 1. The variant light chain and heavy chain polypeptide sequences of the antibody MSM01 that specifically binds to the mesothelin protein are shown in Table 80. For MSM01, expression vectors consisting of the sequences corresponding to Fc-Hole (SEQ ID NO: 7), MSM01 HC (SEQ ID NO: 755), and MSM01 LC (SEQ ID NO: 756) were co-transfected into EXPICHO-S™ (Gibco, A29127) (FIG. 41a, Table 80), and purification and analysis were performed in the same manner as described in Example 1. The variant light chain and heavy chain polypeptide sequences of the antibody LIM01 that specifically binds to the LIV-1 protein are shown in Table 80. For LIM01, expression vectors consisting of the sequences corresponding to Fc-Hole (SEQ ID NO: 7), LIM01 HC (SEQ ID NO: 757), and LIM01 LC (SEQ ID NO: 758) were co-transfected into EXPICHO-S™ (Gibco, A29127) (FIG. 41a, Table 80), and purification and analysis were performed in the same manner as described in Example 1.

TABLE 80

| Target | | | SEQ |
|---|---|---|---|
| Antigen | Name | Sequence | ID NO |
| Human | T01 HC | QVQLQQSGSELKKPGASVKVSCKASGYTFTNYGMNWVKQAPGQC | 753 |
| TROP2 | | LKWMGWINTYTGEPTYTDDFKGRFAFSLDTSVSTAYLQISSLKAD | |
| | | DTAVYFCARGGFGSSYWYFDVWGQGSLVTVSSASTKGPSVFPLAP | |
| | | SSKSTSGGTAALGCLVKDYFPEPVTVSWNSGALTSGVHTFPAVLQS | |
| | | SGLYSLSSVVTVPSSSLGTQTYICNVNHKPSNTKVDKKVEPKSCDK | |
| | | THTCPPCPAPELLGGPSVFLFPPKPKDTLMISRTPEVTCVVVDVSHE | |
| | | DPEVKFNWYVDGVEVHNAKTKPREEQYNSTYRVVSVLTVLHQD | |
| | | WLNGKEYKCKVSNKALPAPIEKTISKAKGQPREPQVYTLPPCREEM | |
| | | TKNQVSLWCLVKGFYPSDIAVEWESNGQPENNYKTTPPVLDSDGS | |
| | | FFLYSKLTVDKSRWQQGNVFSCSVMHEALHNHYTQKSLSLSPGK | |
| | T01 LC | DIQLTQSPSSLSASVGDRVSITCKASQDVSIAVAWYQQKPGKAPKL | 754 |
| | | LIYSASYRYTGVPDRFSGSGSGTDFTLTISSLQPEDFAVYYCQQHYI | |
| | | TPLTFGCGTKVEIKRTVAAPSVFIFPPSDEQLKSGTASVVCLLNNFY | |
| | | PREAKVQWKVDNALQSGNSQESVTEQDSKDSTYSLSSTLTLSKAD | |
| | | YEKHKVYACEVTHQGLSSPVTKSFNRGECGGGGSGGGGSGGGGS | |
| | | EPKSSDKTHTCPPCPAPELLGGPSVFLFPPKPKDTLMISRTPEVTCV | |
| | | VVDVSHEDPEVKFNWYVDGVEVHNAKTKPREEQYNSTYRVVSVL | |
| | | TVLHQDWLNGKEYKCKVSNKALPAPIEKTISKAKGQPREPQVYTL | |
| | | PPCREEMTKNQVSLWCLVKGFYPSDIAVEWESNGQPENNYKTTPP | |
| | | VLDSDGSFFLYSKLTVDKSRWQQGNVFSCSVMHEALHNHYTQKS | |
| | | LSLSPGK | |
| Human | MSM01 | QVQLQQSGPELEKPGASVKISCKASGYSFTGYTMNWVKQSHGKCL | 755 |
| Mesothelin | HC | EWIGLITPYNGASSYNQKFRGKATLTVDKSSSTAYMDLLSLTSEDS | |
| | | AVYFCARGGYDGRGFDYWGQGTTVTVSSASTKGPSVFPLAPSSKS | |
| | | TSGGTAALGCLVKDYFPEPVTVSWNSGALTSGVHTFPAVLQSSGL | |
| | | YSLSSVVTVPSSSLGTQTYICNVNHKPSNTKVDKKVEPKSCDKTHT | |
| | | CPPCPAPELLGGPSVFLFPPKPKDTLMISRTPEVTCVVVDVSHEDPE | |
| | | VKFNWYVDGVEVHNAKTKPREEQYNSTYRVVSVLTVLHQDWLN | |
| | | GKEYKCKVSNKALPAPIEKTISKAKGQPREPQVYTLPPCREEMTKN | |
| | | QVSLWCLVKGFYPSDIAVEWESNGQPENNYKTTPPVLDSDGSFFL | |
| | | YSKLTVDKSRWQQGNVFSCSVMHEALHNHYTQKSLSLSPGK | |
| | MSM01 | DIELTQSPAIMSASPGEKVTMTCSASSSVSYMHWYQQKSGTSPKR | 756 |
| | LC | WIYDTSKLASGVPGRFSGSGSGNSYSLTISSVEAEDDATYYCQQWS | |
| | | KHPLTFGCGTKLEIKRTVAAPSVFIFPPSDEQLKSGTASVVCLLNNF | |
| | | YPREAKVQWKVDNALQSGNSQESVTEQDSKDSTYSLSSTLTLSKA | |
| | | DYEKHKVYACEVTHQGLSSPVTKSFNRGECGGGGSGGGGSGGGG | |
| | | SEPKSSDKTHTCPPCPAPELLGGPSVFLFPPKPKDTLMISRTPEVTCV | |
| | | VVDVSHEDPEVKFNWYVDGVEVHNAKTKPREEQYNSTYRVVSVL | |
| | | TVLHQDWLNGKEYKCKVSNKALPAPIEKTISKAKGQPREPQVYTL | |
| | | PPCREEMTKNQVSLWCLVKGFYPSDIAVEWESNGQPENNYKTTPP | |
| | | VLDSDGSFFLYSKLTVDKSRWQQGNVFSCSVMHEALHNHYTQKS | |
| | | LSLSPGK | |
| Human | LIM01 | EIQLQQSGPELMKPGASVKISCKASTYSFTRYFMHWVKQSHGECLE | 757 |
| LIV-1 | HC | WIGYIDPFNGGTGYNQKFKGKATLTVDKSSSTAYMHLSSLTSEDSA | |
| | | VYYCVTYGSDYFDYWGQGTTLTVSSASTKGPSVFPLAPSSKSTSGG | |
| | | TAALGCLVKDYFPEPVTVSWNSGALTSGVHTFPAVLQSSGLYSLSS | |
| | | VVTVPSSSLGTQTYICNVNHKPSNTKVDKKVEPKSCDKTHTCPPCP | |
| | | APELLGGPSVFLFPPKPKDTLMISRTPEVTCVVVDVSHEDPEVKFN | |
| | | WYVDGVEVHNAKTKPREEQYNSTYRVVSVLTVLHQDWLNGKEY | |
| | | KCKVSNKALPAPIEKTISKAKGQPREPQVYTLPPCREEMTKNQVSL | |
| | | WCLVKGFYPSDIAVEWESNGQPENNYKTTPPVLDSDGSFFLYSKLT | |
| | | VDKSRWQQGNVFSCSVMHEALHNHYTQKSLSLSPGK | |
| | LIM01 | DIVMTQPQKFMSTSVGDRVSVTCKASQNVETDVVWYQQKPGQPP | 758 |
| | LC | KALIYSASYRHSGVPDRFTGSGSGTNFTLTISTVQSEDLAEYFCQQY | |
| | | NNYPFTFGCGTKLEIKRTVAAPSVFIFPPSDEQLKSGTASVVCLLNN | |
| | | FYPREAKVQWKVDNALQSGNSQESVTEQDSKDSTYSLSSTLTLSK | |
| | | ADYEKHKVYACEVTHQGLSSPVTKSFNRGECGGGGSGGGGSGGG | |
| | | GSEPKSSDKTHTCPPCPAPELLGGPSVFLFPPKPKDTLMISRTPEVTC | |
| | | VVVDVSHEDPEVKFNWYVDGVEVHNAKTKPREEQYNSTYRVVSV | |
| | | LTVLHQDWLNGKEYKCKVSNKALPAPIEKTISKAKGQPREPQVYT | |
| | | LPPCREEMTKNQVSLWCLVKGFYPSDIAVEWESNGQPENNYKTTP | |
| | | PVLDSDGSFFLYSKLTVDKSRWQQGNVFSCSVMHEALHNHYTQKS | |
| | | LSLSPGK | |

[0400] Table 81 below shows the heavy chain and light chain nucleotide sequences of the engineered antibodies targeting TROP2, mesothelin, or LIV-1.

TABLE 81

| Target | | | SEQ |
|---|---|---|---|
| Ag | Name | Sequence | ID NO |
| Human | T01 HC | CAGGTGCAGCTCCAGCAGTCTGGTTCCGAGCTGAAGAAACCTGGGGCTTCAGTCAAAGTC | 759 |
| TROP2 | | TCTTGCAAGGCTTCAGGTTACACTTTCACCAATTATGGTATGAACTGGGTCAAGCAAGCT | |
| | | CCTGGTCAGTGTTTGAAGTGGATGGGGTGGATAAACACATATACTGGCGAACCTACATAC | |
| | | ACCGACGACTTCAAGGGACGCTTCGCCTTCTCTCTTGACACAAGTGTCTCAACAGCATAT | |
| | | CTCCAAATCAGTAGCCTTAAGGCCGACGACACAGCAGTTTATTTTTGCGCTAGGGGTGGA | |
| | | TTCGGATCTTCTTACTGGTATTTCGATGTCTGGGGACAAGGAAGTCTGGTCACAGTTTCC | |
| | | AGCGCTAGCACCAAAGGACCTAGTGTTTTTCCTCTTGCCCCTTCCTCAAAGTCTACCTCT | |
| | | GGGGGGACAGCCGCTCTGGGCTGCCTGGTCAAGGATTATTTCCCAGAGCCTGTCACTGTC | |
| | | AGTTGGAACTCTGGAGCCTTGACTTCTGGTGTTCATACATTTCCTGCTGTCCTTCAAAGC | |
| | | AGCGGCTTGTACTCATTGTCTTCTGTTGTGACAGTACCCTCAAGCAGCCTCGGCACTCAG | |
| | | ACATACATCTGCAATGTCAACCACAAACCCTCAAATACAAAGGTAGATAAAAAAGTCGAA | |
| | | CCAAAGTCTTGTGACAAAACTCACACGTGCCCACCGTGCCCAGCACCTGAACTCCTGGGG | |
| | | GGACCGTCAGTCTTCCTCTTCCCCCCAAAACCCAAGGACACCCTCATGATCTCCCGGACC | |
| | | CCTGAGGTCACATGCGTGGTGGTGGACGTGAGCCACGAAGACCCTGAGGTCAAGTTCAAC | |
| | | TGGTACGTGGACGGCGTGGAGGTGCATAATGCCAAGACAAAGCCGCGGGAGGAGCAGTAC | |
| | | AACAGCACGTACCGTGTGGTCAGCGTCCTCACCGTCCTGCACCAGGACTGGCTGAATGGC | |
| | | AAGGAGTACAAGTGCAAGGTCTCCAACAAAGCCCTCCCAGCCCCCATCGAGAAAACCATC | |
| | | TCCAAAGCCAAAGGGCAGCCCCGAGAACCACAGGTGTACACCCTGCCCCCATGCCGGGAG | |
| | | GAGATGACCAAGAACCAGGTCAGCCTGTGGTGCCTGGTCAAAGGCTTCTATCCCAGCGAC | |
| | | ATCGCCGTGGAGTGGGAGAGCAATGGGCAGCCGGAGAACAACTACAAGACCACGCCTCCC | |
| | | GTGCTGGACTCCGACGGCTCCTTCTTCCTCTACAGCAAGCTCACCGTGGACAAGAGCAGG | |
| | | TGGCAGCAGGGGAACGTCTTCTCATGCTCCGTGATGCATGAGGCTCTGCACAACCACTAC | |
| | | ACGCAGAAGAGCCTCTCCCTGTCTCCGGGTAAA | |
| | T01 LC | GACATACAACTCACACAATCTCCCTCTTCTTTGTCAGCTTCCGTTGGGGACAGGGTGTCA | 760 |
| | | ATTACTTGCAAAGCCTCTCAAGATGTTTCTATAGCTGTAGCCTGGTATCAACAGAAACCC | |
| | | GGAAAAGCTCCCAAGTTGTTGATTTATAGTGCTAGTTATAGGTACACTGGCGTGCCAGAT | |
| | | AGATTCAGTGGTAGCGGTTCTGGGACCGACTTTACCTTGACTATTTCTTCCCTGCAACCT | |
| | | GAGGATTTTGCCGTTTACTATTGCCAACAACATTATATTACTCCCCTTACTTTTGGGTGT | |
| | | GGGACCAAGGTAGAAATCAAGCGTACGGTGGCAGCTCCCAGCGTTTTTATCTTTCCCCCA | |
| | | TCCGACGAGCAGCTCAAGAGTGGCACTGCCTCTGTAGTTTGTTTGCTGAATAACTTCTAT | |
| | | CCACGTGAAGCAAAAGTACAGTGGAAGGTCGATAATGCCCTTCAGAGCGGTAACAGCCAA | |
| | | GAAAGTGTTACCGAGCAAGATTCCAAAGATTCCACTTACAGTCTGTCCAGCACATTGACA | |
| | | CTGAGTAAGGCTGATTACGAAAAACACAAGGTGTACGCATGCGAGGTGACACACCAAGGT | |
| | | CTTTCATCTCCTGTAACTAAGAGCTTTAACCGGGGAGAATGTGGTGGTGGGGGCAGCGGG | |
| | | GGCGGAGGTAGTGGAGGCGGCGGTAGTGAACCAAAGAGTAGTGACAAAACTCACACGTGC | |
| | | CCACCGTGCCCAGCACCTGAACTCCTGGGGGGACCGTCAGTCTTCCTCTTCCCCCCAAAA | |
| | | CCCAAGGACACCCTCATGATCTCCCGGACCCCTGAGGTCACATGCGTGGTGGTGGACGTG | |
| | | AGCCACGAAGACCCTGAGGTCAAGTTCAACTGGTACGTGGACGGCGTGGAGGTGCATAAT | |
| | | GCCAAGACAAAGCCGCGGGAGGAGCAGTACAACAGCACGTACCGTGTGGTCAGCGTCCTC | |
| | | ACCGTCCTGCACCAGGACTGGCTGAATGGCAAGGAGTACAAGTGCAAGGTCTCCAACAAA | |
| | | GCCCTCCCAGCCCCCATCGAGAAAACCATCTCCAAAGCCAAAGGGCAGCCCCGAGAACCA | |
| | | CAGGTGTACACCCTGCCCCCATGCCGGGAGGAGATGACCAAGAACCAGGTCAGCCTGTGG | |
| | | TGCCTGGTCAAAGGCTTCTATCCCAGCGACATCGCCGTGGAGTGGGAGAGCAATGGGCAG | |
| | | CCGGAGAACAACTACAAGACCACGCCTCCCGTGCTGGACTCCGACGGCTCCTTCTTCCTC | |
| | | TACAGCAAGCTCACCGTGGACAAGAGCAGGTGGCAGCAGGGGAACGTCTTCTCATGCTCC | |
| | | GTGATGCATGAGGCTCTGCACAACCACTACACGCAGAAGAGCCTCTCCCTGTCTCCGGGT | |
| | | AAA | |
| Human | MSM01 HC | CAGGTTCAATTGCAGCAGTCTGGACCAGAATTGGAGAAGCCTGGCGCAAGCGTCAAAATA | 761 |
| Mesothelin | | TCTTGCAAGGCTTCAGGTTACAGTTTCACCGGATACACTATGAACTGGGTCAAGCAAAGC | |
| | | CACGGCAAGTGTCTTGAATGGATAGGATTGATTACTCCATACAATGGCGCTTCATCATAC | |
| | | AATCAGAAGTTTAGGGGCAAGGCAACTTTGACCGTGGATAAGTCATCATCTACCGCATAT | |
| | | ATGGACCTCTTGAGCCTCACAAGTGAAGACTCAGCTGTTTACTTTTGTGCCAGAGGAGGG | |
| | | TATGATGGGCGAGGATTCGACTATTGGGGTCAAGGAACCACCGTGACAGTAAGCTCTGCT | |
| | | AGCACCAAAGGACCTAGTGTTTTTCCTCTTGCCCCTTCCTCAAAGTCTACCTCTGGGGGG | |
| | | ACAGCCGCTCTGGGCTGCCTGGTCAAGGATTATTTCCCAGAGCCTGTCACTGTCAGTTGG | |
| | | AACTCTGGAGCCTTGACTTCTGGTGTTCATACATTTCCTGCTGTCCTTCAAAGCAGCGGC | |
| | | TTGTACTCATTGTCTTCTGTTGTGACAGTACCCTCAAGCAGCCTCGGCACTCAGACATAC | |
| | | ATCTGCAATGTCAACCACAAACCCTCAAATACAAAGGTAGATAAAAAAGTCGAACCAAAG | |
| | | TCTTGTGACAAAACTCACACGTGCCCACCGTGCCCAGCACCTGAACTCCTGGGGGGACCG | |
| | | TCAGTCTTCCTCTTCCCCCCAAAACCCAAGGACACCCTCATGATCTCCCGGACCCCTGAG | |
| | | GTCACATGCGTGGTGGTGGACGTGAGCCACGAAGACCCTGAGGTCAAGTTCAACTGGTAC | |
| | | GTGGACGGCGTGGAGGTGCATAATGCCAAGACAAAGCCGCGGGAGGAGCAGTACAACAGC | |
| | | ACGTACCGTGTGGTCAGCGTCCTCACCGTCCTGCACCAGGACTGGCTGAATGGCAAGGAG | |
| | | TACAAGTGCAAGGTCTCCAACAAAGCCCTCCCAGCCCCCATCGAGAAAACCATCTCCAAA | |
| | | GCCAAAGGGCAGCCCCGAGAACCACAGGTGTACACCCTGCCCCCATGCCGGGAGGAGATG | |
| | | ACCAAGAACCAGGTCAGCCTGTGGTGCCTGGTCAAAGGCTTCTATCCCAGCGACATCGCC | |
| | | GTGGAGTGGGAGAGCAATGGGCAGCCGGAGAACAACTACAAGACCACGCCTCCCGTGCTG | |
| | | GACTCCGACGGCTCCTTCTTCCTCTACAGCAAGCTCACCGTGGACAAGAGCAGGTGGCAG | |
| | | CAGGGGAACGTCTTCTCATGCTCCGTGATGCATGAGGCTCTGCACAACCACTACACGCAG | |
| | | AAGAGCCTCTCCCTGTCTCCGGGTAAA | |
| | MSM01 LC | GACATAGAGTTGACTCAATCTCCAGCAATCATGTCAGCCTCACCCGGAGAAAAGGTCACC | 762 |
| | | ATGACTTGTTCTGCAAGTTCCAGCGTTTCTTATATGCATTGGTACCAGCAGAAGTCAGGG | |
| | | ACTAGCCCTAAGAGATGGATTTACGATACCTCCAAACTGGCCTCCGGGGTGCCAGGCCGG | |
| | | TTTAGTGGCAGTGGAAGCGGTAACAGCTACTCTTTGACCATATCTAGCGTGGAAGCAGAG | |
| | | GACGACGCTACTTATTACTGTCAACAGTGGTCTAAGCACCCACTGACCTTCGGCTGTGGT | |
| | | ACAAAGCTCGAAATAAAACGTACGGTGGCAGCTCCCAGCGTTTTTATCTTTCCCCCATCC | |
| | | GACGAGCAGCTCAAGAGTGGCACTGCCTCTGTAGTTTGTTTGCTGAATAACTTCTATCCA | |
| | | CGTGAAGCAAAAGTACAGTGGAAGGTCGATAATGCCCTTCAGAGCGGTAACAGCCAAGAA | |
| | | AGTGTTACCGAGCAAGATTCCAAAGATTCCACTTACAGTCTGTCCAGCACATTGACACTG | |
| | | AGTAAGGCTGATTACGAAAAACACAAGGTGTACGCATGCGAGGTGACACACCAAGGTCTT | |
| | | TCATCTCCTGTAACTAAGAGCTTTAACCGGGGAGAATGTGGTGGTGGGGGCAGCGGGGGC | |
| | | GGAGGTAGTGGAGGCGGCGGTAGTGAACCAAAGAGTAGTGACAAAACTCACACGTGCCCA | |
| | | CCGTGCCCAGCACCTGAACTCCTGGGGGGACCGTCAGTCTTCCTCTTCCCCCCAAAACCC | |
| | | AAGGACACCCTCATGATCTCCCGGACCCCTGAGGTCACATGCGTGGTGGTGGACGTGAGC | |
| | | CACGAAGACCCTGAGGTCAAGTTCAACTGGTACGTGGACGGCGTGGAGGTGCATAATGCC | |
| | | AAGACAAAGCCGCGGGAGGAGCAGTACAACAGCACGTACCGTGTGGTCAGCGTCCTCACC | |
| | | GTCCTGCACCAGGACTGGCTGAATGGCAAGGAGTACAAGTGCAAGGTCTCCAACAAAGCC | |
| | | CTCCCAGCCCCCATCGAGAAAACCATCTCCAAAGCCAAAGGGCAGCCCCGAGAACCACAG | |
| | | GTGTACACCCTGCCCCCATGCCGGGAGGAGATGACCAAGAACCAGGTCAGCCTGTGGTGC | |
| | | CTGGTCAAAGGCTTCTATCCCAGCGACATCGCCGTGGAGTGGGAGAGCAATGGGCAGCCG | |
| | | GAGAACAACTACAAGACCACGCCTCCCGTGCTGGACTCCGACGGCTCCTTCTTCCTCTAC | |
| | | AGCAAGCTCACCGTGGACAAGAGCAGGTGGCAGCAGGGGAACGTCTTCTCATGCTCCGTG | |
| | | ATGCATGAGGCTCTGCACAACCACTACACGCAGAAGAGCCTCTCCCTGTCTCCGGGTAAA | |
| Human | LIM01 HC | GAGATACAGTTGCAGCAAAGCGGACCCGAGCTTATGAAACCAGGAGCTAGTGTGAAAATT | 763 |
| LIV-1 | | AGCTGCAAGGCTAGCACCTACTCTTTTACTCGCTATTTTATGCATTGGGTTAAACAGTCA | |
| | | CATGGTGAGTGTTTGGAATGGATCGGGTACATTGATCCCTTTAATGGAGGGACTGGCTAC | |
| | | AACCAGAAGTTTAAAGGAAAAGCCACTCTCACTGTTGACAAAAGTAGTAGTACAGCATAT | |
| | | ATGCACCTCAGTTCCCTTACCAGTGAAGATAGCGCAGTTTACTATTGTGTCACTTACGGA | |
| | | TCAGACTACTTCGACTATTGGGGACAGGGTACAACCCTTACAGTCTCCAGTGCTAGCACC | |
| | | AAAGGACCTAGTGTTTTTCCTCTTGCCCCTTCCTCAAAGTCTACCTCTGGGGGGACAGCC | |
| | | GCTCTGGGCTGCCTGGTCAAGGATTATTTCCCAGAGCCTGTCACTGTCAGTTGGAACTCT | |
| | | GGAGCCTTGACTTCTGGTGTTCATACATTTCCTGCTGTCCTTCAAAGCAGCGGCTTGTAC | |
| | | TCATTGTCTTCTGTTGTGACAGTACCCTCAAGCAGCCTCGGCACTCAGACATACATCTGC | |
| | | AATGTCAACCACAAACCCTCAAATACAAAGGTAGATAAAAAAGTCGAACCAAAGTCTTGT | |
| | | GACAAAACTCACACGTGCCCACCGTGCCCAGCACCTGAACTCCTGGGGGGACCGTCAGTC | |
| | | TTCCTCTTCCCCCCAAAACCCAAGGACACCCTCATGATCTCCCGGACCCCTGAGGTCACA | |
| | | TGCGTGGTGGTGGACGTGAGCCACGAAGACCCTGAGGTCAAGTTCAACTGGTACGTGGAC | |
| | | GGCGTGGAGGTGCATAATGCCAAGACAAAGCCGCGGGAGGAGCAGTACAACAGCACGTAC | |
| | | CGTGTGGTCAGCGTCCTCACCGTCCTGCACCAGGACTGGCTGAATGGCAAGGAGTACAAG | |
| | | TGCAAGGTCTCCAACAAAGCCCTCCCAGCCCCCATCGAGAAAACCATCTCCAAAGCCAAA | |
| | | GGGCAGCCCCGAGAACCACAGGTGTACACCCTGCCCCCATGCCGGGAGGAGATGACCAAG | |
| | | AACCAGGTCAGCCTGTGGTGCCTGGTCAAAGGCTTCTATCCCAGCGACATCGCCGTGGAG | |
| | | TGGGAGAGCAATGGGCAGCCGGAGAACAACTACAAGACCACGCCTCCCGTGCTGGACTCC | |
| | | GACGGCTCCTTCTTCCTCTACAGCAAGCTCACCGTGGACAAGAGCAGGTGGCAGCAGGGG | |
| | | AACGTCTTCTCATGCTCCGTGATGCATGAGGCTCTGCACAACCACTACACGCAGAAGAGC | |
| | | CTCTCCCTGTCTCCGGGTAAA | |
| | LIM01 LC | GACATAGTGATGACCCAACCACAAAAGTTTATGTCAACCTCCGTTGGAGATCGTGTTTCT | 764 |
| | | GTCACTTGTAAGGCATCACAGAATGTAGAGACAGACGTAGTCTGGTATCAGCAGAAACCT | |
| | | GGTCAGCCACCTAAAGCACTCATCTACAGTGCAAGTTACCGACATTCTGGCGTACCCGAC | |
| | | AGATTTACTGGGTCTGGTTCTGGTACAAATTTCACTCTCACCATCTCAACCGTCCAATCA | |
| | | GAAGACTTGGCCGAGTATTTTTGCCAGCAATATAACAATTATCCCTTTACATTCGGATGT | |
| | | GGGACCAAACTCGAAATCAAACGTACGGTGGCAGCTCCCAGCGTTTTTATCTTTCCCCCA | |
| | | TCCGACGAGCAGCTCAAGAGTGGCACTGCCTCTGTAGTTTGTTTGCTGAATAACTTCTAT | |
| | | CCACGTGAAGCAAAAGTACAGTGGAAGGTCGATAATGCCCTTCAGAGCGGTAACAGCCAA | |
| | | GAAAGTGTTACCGAGCAAGATTCCAAAGATTCCACTTACAGTCTGTCCAGCACATTGACA | |
| | | CTGAGTAAGGCTGATTACGAAAAACACAAGGTGTACGCATGCGAGGTGACACACCAAGGT | |
| | | CTTTCATCTCCTGTAACTAAGAGCTTTAACCGGGGAGAATGTGGTGGTGGGGGCAGCGGG | |
| | | GGCGGAGGTAGTGGAGGCGGCGGTAGTGAACCAAAGAGTAGTGACAAAACTCACACGTGC | |
| | | CCACCGTGCCCAGCACCTGAACTCCTGGGGGGACCGTCAGTCTTCCTCTTCCCCCCAAAA | |
| | | CCCAAGGACACCCTCATGATCTCCCGGACCCCTGAGGTCACATGCGTGGTGGTGGACGTG | |
| | | AGCCACGAAGACCCTGAGGTCAAGTTCAACTGGTACGTGGACGGCGTGGAGGTGCATAAT | |
| | | GCCAAGACAAAGCCGCGGGAGGAGCAGTACAACAGCACGTACCGTGTGGTCAGCGTCCTC | |
| | | ACCGTCCTGCACCAGGACTGGCTGAATGGCAAGGAGTACAAGTGCAAGGTCTCCAACAAA | |
| | | GCCCTCCCAGCCCCCATCGAGAAAACCATCTCCAAAGCCAAAGGGCAGCCCCGAGAACCA | |
| | | CAGGTGTACACCCTGCCCCCATGCCGGGAGGAGATGACCAAGAACCAGGTCAGCCTGTGG | |
| | | TGCCTGGTCAAAGGCTTCTATCCCAGCGACATCGCCGTGGAGTGGGAGAGCAATGGGCAG | |
| | | CCGGAGAACAACTACAAGACCACGCCTCCCGTGCTGGACTCCGACGGCTCCTTCTTCCTC | |
| | | TACAGCAAGCTCACCGTGGACAAGAGCAGGTGGCAGCAGGGGAACGTCTTCTCATGCTCC | |
| | | GTGATGCATGAGGCTCTGCACAACCACTACACGCAGAAGAGCCTCTCCCTGTCTCCGGGT | |
| | | AAA | |

[0401] Table 82 below shows the polypeptide sequences of the heavy chain variable region (VH) and light chain variable region (VL) of the engineered antibodies targeting TROP2, mesothelin, or LIV-1. Table 83 below shows the nucleotide sequences of the heavy chain variable region (VH) and light chain variable region (VL) of the engineered antibodies targeting TROP2, mesothelin, or LIV-1.

TABLE 82

| | | | | SEQ |
|---|---|---|---|---|
| Antigen | Name | | Sequence | ID NO |
| Human | T01 | VH | QVQLQQSGSELKKPGASVKV | 765 |
| TROP2 | | | SCKASGYTFTNYGMNWVKQA | |
| | | | PGQCLKWMGWINTYTGEPTY | |
| | | | TDDFKGRFAFSLDTSVSTAY | |
| | | | LQISSLKADDTAVYFCARGG | |
| | | | FGSSYWYFDVWGQGSLVTVS | |
| | | | S | |
| | | VL | DIQLTQSPSSLSASVGDRVS | 766 |
| | | | ITCKASQDVSIAVAWYQQKP | |
| | | | GKAPKLLIYSASYRYTGVPD | |
| | | | RFSGSGSGTDFTLTISSLQP | |
| | | | EDFAVYYCQQHYITPLTFGC | |
| | | | GTKVEIK | |
| Human | MSM01 | VH | QVQLQQSGPELEKPGASVKI | 767 |
| Mesothelin | | | SCKASGYSFTGYTMNWVKQS | |
| | | | HGKCLEWIGLITPYNGASSY | |
| | | | NQKFRGKATLTVDKSSSTAY | |
| | | | MDLLSLTSEDSAVYFCARGG | |
| | | | YDGRGFDYWGQGTTVTVSS | |
| | | VL | DIELTQSPAIMSASPGEKVT | 768 |
| | | | MTCSASSSVSYMHWYQQKSG | |
| | | | TSPKRWIYDTSKLASGVPGR | |
| | | | FSGSGSGNSYSLTISSVEAE | |
| | | | DDATYYCQQWSKHPLTFGCG | |
| | | | TKLEIK | |
| Human | LIM01 | VH | EIQLQQSGPELMKPGASVKI | 769 |
| LIV-1 | | | SCKASTYSFTRYFMHWVKQS | |
| | | | HGECLEWIGYIDPFNGGTGY | |
| | | | NQKFKGKATLTVDKSSSTAY | |
| | | | MHLSSLTSEDSAVYYCVTYG | |
| | | | SDYFDYWGQGTTLTVSS | |
| | | VL | DIVMTQPQKFMSTSVGDRVS | 770 |
| | | | VTCKASQNVETDVVWYQQKP | |
| | | | GQPPKALIYSASYRHSGVPD | |
| | | | RFTGSGSGTNFTLTISTVQS | |
| | | | EDLAEYFCQQYNNYPFTFGC | |
| | | | GTKLEIK | |

TABLE 83

| | | | | SEQ |
|---|---|---|---|---|
| Antigen | Name | | Sequence | ID NO |
| Human | T01 | VH | CAGGTGCAGCTCCAGCAGTCTGGTTCCGAGCTGAAGAAAC | 771 |
| TROP2 | | | CTGGGGCTTCAGTCAAAGTCTCTTGCAAGGCTTCAGGTTA | |
| | | | CACTTTCACCAATTATGGTATGAACTGGGTCAAGCAAGCT | |
| | | | CCTGGTCAGTGTTTGAAGTGGATGGGGTGGATAAACACAT | |
| | | | ATACTGGCGAACCTACATACACCGACGACTTCAAGGGACG | |
| | | | CTTCGCCTTCTCTCTTGACACAAGTGTCTCAACAGCATATC | |
| | | | TCCAAATCAGTAGCCTTAAGGCCGACGACACAGCAGTTTA | |
| | | | TTTTTGCGCTAGGGGTGGATTCGGATCTTCTTACTGGTATT | |
| | | | TCGATGTCTGGGGACAAGGAAGTCTGGTCACAGTTTCCAG | |
| | | | C | |
| | | VL | GACATACAACTCACACAATCTCCCTCTTCTTTGTCAGCTTC | 772 |
| | | | CGTTGGGGACAGGGTGTCAATTACTTGCAAAGCCTCTCAA | |
| | | | GATGTTTCTATAGCTGTAGCCTGGTATCAACAGAAACCCG | |
| | | | GAAAAGCTCCCAAGTTGTTGATTTATAGTGCTAGTTATAG | |
| | | | GTACACTGGCGTGCCAGATAGATTCAGTGGTAGCGGTTCT | |
| | | | GGGACCGACTTTACCTTGACTATTTCTTCCCTGCAACCTGA | |
| | | | GGATTTTGCCGTTTACTATTGCCAACAACATTATATTACTC | |
| | | | CCCTTACTTTTGGGTGTGGGACCAAGGTAGAAATCAAG | |
| Human | MSM01 | VH | CAGGTTCAATTGCAGCAGTCTGGACCAGAATTGGAGAAGC | 773 |
| Mesothelin | | | CTGGCGCAAGCGTCAAAATATCTTGCAAGGCTTCAGGTTA | |
| | | | CAGTTTCACCGGATACACTATGAACTGGGTCAAGCAAAGC | |
| | | | CACGGCAAGTGTCTTGAATGGATAGGATTGATTACTCCAT | |
| | | | ACAATGGCGCTTCATCATACAATCAGAAGTTTAGGGGCAA | |
| | | | GGCAACTTTGACCGTGGATAAGTCATCATCTACCGCATAT | |
| | | | ATGGACCTCTTGAGCCTCACAAGTGAAGACTCAGCTGTTT | |
| | | | ACTTTTGTGCCAGAGGAGGGTATGATGGGCGAGGATTCGA | |
| | | | CTATTGGGGTCAAGGAACCACCGTGACAGTAAGCTCT | |
| | | VL | GACATAGAGTTGACTCAATCTCCAGCAATCATGTCAGCCT | 774 |
| | | | CACCCGGAGAAAAGGTCACCATGACTTGTTCTGCAAGTTC | |
| | | | CAGCGTTTCTTATATGCATTGGTACCAGCAGAAGTCAGGG | |
| | | | ACTAGCCCTAAGAGATGGATTTACGATACCTCCAAACTGG | |
| | | | CCTCCGGGGTGCCAGGCCGGTTTAGTGGCAGTGGAAGCGG | |
| | | | TAACAGCTACTCTTTGACCATATCTAGCGTGGAAGCAGAG | |
| | | | GACGACGCTACTTATTACTGTCAACAGTGGTCTAAGCACC | |
| | | | CACTGACCTTCGGCTGTGGTACAAAGCTCGAAATAAAA | |
| Human | LIM01 | VH | GAGATACAGTTGCAGCAAAGCGGACCCGAGCTTATGAAA | 775 |
| LIV-1 | | | CCAGGAGCTAGTGTGAAAATTAGCTGCAAGGCTAGCACCT | |
| | | | ACTCTTTTACTCGCTATTTTATGCATTGGGTTAAACAGTCA | |
| | | | CATGGTGAGTGTTTGGAATGGATCGGGTACATTGATCCCT | |
| | | | TTAATGGAGGGACTGGCTACAACCAGAAGTTTAAAGGAA | |
| | | | AAGCCACTCTCACTGTTGACAAAAGTAGTAGTACAGCATA | |
| | | | TATGCACCTCAGTTCCCTTACCAGTGAAGATAGCGCAGTTT | |
| | | | ACTATTGTGTCACTTACGGATCAGACTACTTCGACTATTGG | |
| | | | GGACAGGGTACAACCCTTACAGTCTCCAGT | |
| | | VL | GACATAGTGATGACCCAACCACAAAAGTTTATGTCAACCT | 776 |
| | | | CCGTTGGAGATCGTGTTTCTGTCACTTGTAAGGCATCACAG | |
| | | | AATGTAGAGACAGACGTAGTCTGGTATCAGCAGAAACCTG | |
| | | | GTCAGCCACCTAAAGCACTCATCTACAGTGCAAGTTACCG | |
| | | | ACATTCTGGCGTACCCGACAGATTTACTGGGTCTGGTTCTG | |
| | | | GTACAAATTTCACTCTCACCATCTCAACCGTCCAATCAGA | |
| | | | AGACTTGGCCGAGTATTTTTGCCAGCAATATAACAATTAT | |
| | | | CCCTTTACATTCGGATGTGGGACCAAACTCGAAATCAAA | |

[0402] Table 84 below shows the heavy chain and light chain CDR sequences of the engineered antibodies targeting TROP2, mesothelin, or LIV-1.

TABLE 84

| | | | | SEQ |
|---|---|---|---|---|
| Antigen | Name | CDR | Sequence | ID NO |
| Human | CEA01 | CDR-H1 | NYGMN | 260 |
| TROP2 | | CDR-H2 | WINTYTGEPTYTDDFKG | 261 |
| | | CDR-H3 | GGFGSSYWYFDV | 262 |
| | | CDR-L1 | KASQDVSIAVA | 263 |
| | | CDR-L2 | SASYRYT | 264 |
| | | CDR-L3 | QQHYITPLT | 265 |
| Human | MSM01 | CDR-H1 | GYTMN | 777 |
| Mesothelin | | CDR-H2 | LITPYNGASSYNQKFRG | 778 |
| | | CDR-H3 | GGYDGRGFDY | 779 |
| | | CDR-L1 | SASSSVSYMH | 780 |
| | | CDR-L2 | DTSKLAS | 781 |
| | | CDR-L3 | QQWSKHPLT | 782 |
| Human | LIM01 | CDR-H1 | RYFMH | 783 |
| LIV-1 | | CDR-H2 | YIDPFNGGTGYNQKFKG | 784 |
| | | CDR-H3 | YGSDYFDY | 785 |
| | | CDR-L1 | KASQNVETDVV | 786 |
| | | CDR-L2 | SASYRHS | 787 |
| | | CDR-L3 | QQYNNYP | 788 |

[0403] In order to analyze the binding constants, the human TROP2 recombinant protein (Sino Biologicals, 10428-H08H), the human mesothelin recombinant protein (Sino Biologicals, 13128-H08H) or the human LIV-1 recombinant protein (Acro biosystems, LV1-H5223) was loaded onto the Anti-Penta-HIS (HIS1K) biosensor (Sartorius, 18-5120). Then, the antibodies were added in a binding reaction and a dissociation reaction at various concentrations, and the affinities of each antibody for the human antigen was calculated (FIG. 52, Table 85). Table 85 below illustrates the binding constants of the engineered antibodies targeting TROP2, mesothelin, or LIV-1.

TABLE 85

| Antigens | Antibodies | K_{D} (nM) | Kₐ (1/Ms) | K_{d} (1/s) |
|---|---|---|---|---|
| Human TROP2 | T01 | 1.2008 | 2.67E+05 | 3.21E−04 |
| Human Mesothelin | MSM01 | 7.1771 | 1.59E+05 | 1.14E−03 |
| Human LIV-1 | LIM01 | 0.8072 | 3.84E+05 | 3.10E−04 |

The application's sequence listing, which the Patent Office published only in electronic form, follows.

SEQUENCE LISTING (833 sequences)

SEQ ID NO: 1 - protein, 218 aa, synthetic construct
  REGION 1..218: note = Trastuzumab VH-CH1 domain
EVQLVESGGGLVQPGGSLRLSCAASGFNIKDTYIHWVRQAPGKGLEWVARIYPTNGYTRYADSVKGRFTISADTSKNTAYLQMNSLRAEDTAVYYCSRWGGDGFYAMDYWGQGTLVTVSSASTKGPSVFPLAPSSKSTSGGTAALGCLVKDYFPEPVTVSWNSGALTSGVHTFPAVLQSSGLYSLSSVVTVPSSSLGTQTYICNVNHKPSNTKVDKKV

SEQ ID NO: 2 - protein, 214 aa, synthetic construct
  REGION 1..214: note = Trastuzumab VL-CL domain
DIQMTQSPSSLSASVGDRVTITCRASQDVNTAVAWYQQKPGKAPKLLIYSASFLYSGVPSRFSGSRSGTDFTLTISSLQPEDFATYYCQQHYTTPPTFGQGTKVEIKRTVAAPSVFIFPPSDEQLKSGTASVVCLLNNFYPREAKVQWKVDNALQSGNSQESVTEQDSKDSTYSLSSTLTLSKADYEKHKVYACEVTHQGLSSPVTKSFNRGEC

SEQ ID NO: 3 - protein, 217 aa, synthetic construct
  REGION 1..217: note = IgG1 Fc(CH2-CH3)
APELLGGPSVFLFPPKPKDTLMISRTPEVTCVVVDVSHEDPEVKFNWYVDGVEVHNAKTKPREEQYNSTYRVVSVLTVLHQDWLNGKEYKCKVSNKALPAPIEKTISKAKGQPREPQVYTLPPSREEMTKNQVSLTCLVKGFYPSDIAVEWESNGQPENNYKTTPPVLDSDGSFFLYSKLTVDKSRWQQGNVFSCSVMHEALHNHYTQKSLSLSPGK

SEQ ID NO: 4 - protein, 217 aa, synthetic construct
  REGION 1..217: note = IgG1 Fc (Knob; S354C, T366W)
APELLGGPSVFLFPPKPKDTLMISRTPEVTCVVVDVSHEDPEVKFNWYVDGVEVHNAKTKPREEQYNSTYRVVSVLTVLHQDWLNGKEYKCKVSNKALPAPIEKTISKAKGQPREPQVYTLPPCREEMTKNQVSLWCLVKGFYPSDIAVEWESNGQPENNYKTTPPVLDSDGSFFLYSKLTVDKSRWQQGNVFSCSVMHEALHNHYTQKSLSLSPGK

SEQ ID NO: 5 - protein, 217 aa, synthetic construct
  REGION 1..217: note = IgG1 Fc (Hole; Y349C, T366S, L368A, Y407V)
APELLGGPSVFLFPPKPKDTLMISRTPEVTCVVVDVSHEDPEVKFNWYVDGVEVHNAKTKPREEQYNSTYRVVSVLTVLHQDWLNGKEYKCKVSNKALPAPIEKTISKAKGQPREPQVCTLPPSREEMTKNQVSLSCAVKGFYPSDIAVEWESNGQPENNYKTTPPVLDSDGSFFLVSKLTVDKSRWQQGNVFSCSVMHEALHNHYTQKSLSLSPGK

SEQ ID NO: 6 - protein, 15 aa, synthetic construct
  REGION 1..15: note = 15-mer Linker
GGGGSGGGGSGGGGS

SEQ ID NO: 7 - protein, 227 aa, synthetic construct
  REGION 1..227: note = Fc-Hole
DKTHTCPPCPAPELLGGPSVFLFPPKPKDTLMISRTPEVTCVVVDVSHEDPEVKFNWYVDGVEVHNAKTKPREEQYNSTYRVVSVLTVLHQDWLNGKEYKCKVSNKALPAPIEKTISKAKGQPREPQVCTLPPSREEMTKNQVSLSCAVKGFYPSDIAVEWESNGQPENNYKTTPPVLDSDGSFFLVSKLTVDKSRWQQGNVFSCSVMHEALHNHYTQKSLSLSPGK

SEQ ID NO: 8 - protein, 450 aa, synthetic construct
  REGION 1..450: note = TraH-WT-Knob
EVQLVESGGGLVQPGGSLRLSCAASGFNIKDTYIHWVRQAPGKGLEWVARIYPTNGYTRYADSVKGRFTISADTSKNTAYLQMNSLRAEDTAVYYCSRWGGDGFYAMDYWGQGTLVTVSSASTKGPSVFPLAPSSKSTSGGTAALGCLVKDYFPEPVTVSWNSGALTSGVHTFPAVLQSSGLYSLSSVVTVPSSSLGTQTYICNVNHKPSNTKVDKKVEPKSCDKTHTCPPCPAPELLGGPSVFLFPPKPKDTLMISRTPEVTCVVVDVSHEDPEVKFNWYVDGVEVHNAKTKPREEQYNSTYRVVSVLTVLHQDWLNGKEYKCKVSNKALPAPIEKTISKAKGQPREPQVYTLPPCREEMTKNQVSLWCLVKGFYPSDIAVEWESNGQPENNYKTTPPVLDSDGSFFLYSKLTVDKSRWQQGNVFSCSVMHEALHNHYTQKSLSLSPGK

SEQ ID NO: 9 - protein, 461 aa, synthetic construct
  REGION 1..461: note = TraL-WT-Knob
DIQMTQSPSSLSASVGDRVTITCRASQDVNTAVAWYQQKPGKAPKLLIYSASFLYSGVPSRFSGSRSGTDFTLTISSLQPEDFATYYCQQHYTTPPTFGQGTKVEIKRTVAAPSVFIFPPSDEQLKSGTASVVCLLNNFYPREAKVQWKVDNALQSGNSQESVTEQDSKDSTYSLSSTLTLSKADYEKHKVYACEVTHQGLSSPVTKSFNRGECGGGGSGGGGSGGGGSEPKSSDKTHTCPPCPAPELLGGPSVFLFPPKPKDTLMISRTPEVTCVVVDVSHEDPEVKFNWYVDGVEVHNAKTKPREEQYNSTYRVVSVLTVLHQDWLNGKEYKCKVSNKALPAPIEKTISKAKGQPREPQVYTLPPCREEMTKNQVSLWCLVKGFYPSDIAVEWESNGQPENNYKTTPPVLDSDGSFFLYSKLTVDKSRWQQGNVFSCSVMHEALHNHYTQKSLSLSPGK

SEQ ID NO: 10 - protein, 450 aa, synthetic construct
  REGION 1..450: note = TraH-Q105C-Knob
EVQLVESGGGLVQPGGSLRLSCAASGFNIKDTYIHWVRQAPGKGLEWVARIYPTNGYTRYADSVKGRFTISADTSKNTAYLQMNSLRAEDTAVYYCSRWGGDGFYAMDYWGCGTLVTVSSASTKGPSVFPLAPSSKSTSGGTAALGCLVKDYFPEPVTVSWNSGALTSGVHTFPAVLQSSGLYSLSSVVTVPSSSLGTQTYICNVNHKPSNTKVDKKVEPKSCDKTHTCPPCPAPELLGGPSVFLFPPKPKDTLMISRTPEVTCVVVDVSHEDPEVKFNWYVDGVEVHNAKTKPREEQYNSTYRVVSVLTVLHQDWLNGKEYKCKVSNKALPAPIEKTISKAKGQPREPQVYTLPPCREEMTKNQVSLWCLVKGFYPSDIAVEWESNGQPENNYKTTPPVLDSDGSFFLYSKLTVDKSRWQQGNVFSCSVMHEALHNHYTQKSLSLSPGK

SEQ ID NO: 11 - protein, 461 aa, synthetic construct
  REGION 1..461: note = TraL-A43C-Knob
DIQMTQSPSSLSASVGDRVTITCRASQDVNTAVAWYQQKPGKCPKLLIYSASFLYSGVPSRFSGSRSGTDFTLTISSLQPEDFATYYCQQHYTTPPTFGQGTKVEIKRTVAAPSVFIFPPSDEQLKSGTASVVCLLNNFYPREAKVQWKVDNALQSGNSQESVTEQDSKDSTYSLSSTLTLSKADYEKHKVYACEVTHQGLSSPVTKSFNRGECGGGGSGGGGSGGGGSEPKSSDKTHTCPPCPAPELLGGPSVFLFPPKPKDTLMISRTPEVTCVVVDVSHEDPEVKFNWYVDGVEVHNAKTKPREEQYNSTYRVVSVLTVLHQDWLNGKEYKCKVSNKALPAPIEKTISKAKGQPREPQVYTLPPCREEMTKNQVSLWCLVKGFYPSDIAVEWESNGQPENNYKTTPPVLDSDGSFFLYSKLTVDKSRWQQGNVFSCSVMHEALHNHYTQKSLSLSPGK

SEQ ID NO: 12 - protein, 450 aa, synthetic construct
  REGION 1..450: note = TraH-F122C-Knob
EVQLVESGGGLVQPGGSLRLSCAASGFNIKDTYIHWVRQAPGKGLEWVARIYPTNGYTRYADSVKGRFTISADTSKNTAYLQMNSLRAEDTAVYYCSRWGGDGFYAMDYWGQGTLVTVSSASTKGPSVCPLAPSSKSTSGGTAALGCLVKDYFPEPVTVSWNSGALTSGVHTFPAVLQSSGLYSLSSVVTVPSSSLGTQTYICNVNHKPSNTKVDKKVEPKSCDKTHTCPPCPAPELLGGPSVFLFPPKPKDTLMISRTPEVTCVVVDVSHEDPEVKFNWYVDGVEVHNAKTKPREEQYNSTYRVVSVLTVLHQDWLNGKEYKCKVSNKALPAPIEKTISKAKGQPREPQVYTLPPCREEMTKNQVSLWCLVKGFYPSDIAVEWESNGQPENNYKTTPPVLDSDGSFFLYSKLTVDKSRWQQGNVFSCSVMHEALHNHYTQKSLSLSPGK

SEQ ID NO: 13 - protein, 461 aa, synthetic construct
  REGION 1..461: note = TraL-S121C-Knob
DIQMTQSPSSLSASVGDRVTITCRASQDVNTAVAWYQQKPGKAPKLLIYSASFLYSGVPSRFSGSRSGTDFTLTISSLQPEDFATYYCQQHYTTPPTFGQGTKVEIKRTVAAPSVFIFPPCDEQLKSGTASVVCLLNNFYPREAKVQWKVDNALQSGNSQESVTEQDSKDSTYSLSSTLTLSKADYEKHKVYACEVTHQGLSSPVTKSFNRGECGGGGSGGGGSGGGGSEPKSSDKTHTCPPCPAPELLGGPSVFLFPPKPKDTLMISRTPEVTCVVVDVSHEDPEVKFNWYVDGVEVHNAKTKPREEQYNSTYRVVSVLTVLHQDWLNGKEYKCKVSNKALPAPIEKTISKAKGQPREPQVYTLPPCREEMTKNQVSLWCLVKGFYPSDIAVEWESNGQPENNYKTTPPVLDSDGSFFLYSKLTVDKSRWQQGNVFSCSVMHEALHNRFTQKSLSLSPGK

SEQ ID NO: 14 - protein, 450 aa, synthetic construct
  REGION 1..450: note = TraH-G44C-Knob
EVQLVESGGGLVQPGGSLRLSCAASGFNIKDTYIHWVRQAPGKCLEWVARIYPTNGYTRYADSVKGRFTISADTSKNTAYLQMNSLRAEDTAVYYCSRWGGDGFYAMDYWGQGTLVTVSSASTKGPSVFPLAPSSKSTSGGTAALGCLVKDYFPEPVTVSWNSGALTSGVHTFPAVLQSSGLYSLSSVVTVPSSSLGTQTYICNVNHKPSNTKVDKKVEPKSCDKTHTCPPCPAPELLGGPSVFLFPPKPKDTLMISRTPEVTCVVVDVSHEDPEVKFNWYVDGVEVHNAKTKPREEQYNSTYRVVSVLTVLHQDWLNGKEYKCKVSNKALPAPIEKTISKAKGQPREPQVYTLPPCREEMTKNQVSLWCLVKGFYPSDIAVEWESNGQPENNYKTTPPVLDSDGSFFLYSKLTVDKSRWQQGNVFSCSVMHEALHNHYTQKSLSLSPGK

SEQ ID NO: 15 - protein, 461 aa, synthetic construct
  REGION 1..461: note = TraL-Q100C-Knob
DIQMTQSPSSLSASVGDRVTITCRASQDVNTAVAWYQQKPGKAPKLLIYSASFLYSGVPSRFSGSRSGTDFTLTISSLQPEDFATYYCQQHYTTPPTFGCGTKVEIKRTVAAPSVFIFPPSDEQLKSGTASVVCLLNNFYPREAKVQWKVDNALQSGNSQESVTEQDSKDSTYSLSSTLTLSKADYEKHKVYACEVTHQGLSSPVTKSFNRGECGGGGSGGGGSGGGGSEPKSSDKTHTCPPCPAPELLGGPSVFLFPPKPKDTLMISRTPEVTCVVVDVSHEDPEVKFNWYVDGVEVHNAKTKPREEQYNSTYRVVSVLTVLHQDWLNGKEYKCKVSNKALPAPIEKTISKAKGQPREPQVYTLPPCREEMTKNQVSLWCLVKGFYPSDIAVEWESNGQPENNYKTTPPVLDSDGSFFLYSKLTVDKSRWQQGNVFSCSVMHEALHNHYTQKSLSLSPGK

SEQ ID NO: 16 - protein, 456 aa, synthetic construct
  REGION 1..456: note = TraL-Q100C-Knob1
DIQMTQSPSSLSASVGDRVTITCRASQDVNTAVAWYQQKPGKAPKLLIYSASFLYSGVPSRFSGSRSGTDFTLTISSLQPEDFATYYCQQHYTTPPTFGCGTKVEIKRTVAAPSVFIFPPSDEQLKSGTASVVCLLNNFYPREAKVQWKVDNALQSGNSQESVTEQDSKDSTYSLSSTLTLSKADYEKHKVYACEVTHQGLSSPVTKSFNRGECGGGGSGGGGSEPKSSDKTHTCPPCPAPELLGGPSVFLFPPKPKDTLMISRTPEVTCVVVDVSHEDPEVKFNWYVDGVEVHNAKTKPREEQYNSTYRVVSVLTVLHQDWLNGKEYKCKVSNKALPAPIEKTISKAKGQPREPQVYTLPPCREEMTKNQVSLWCLVKGFYPSDIAVEWESNGQPENNYKTTPPVLDSDGSFFLYSKLTVDKSRWQQGNVFSCSVMHEALHNHYTQKSLSLSPGK

SEQ ID NO: 17 - protein, 451 aa, synthetic construct
  REGION 1..451: note = TraL-Q100C-Knob2
DIQMTQSPSSLSASVGDRVTITCRASQDVNTAVAWYQQKPGKAPKLLIYSASFLYSGVPSRFSGSRSGTDFTLTISSLQPEDFATYYCQQHYTTPPTFGCGTKVEIKRTVAAPSVFIFPPSDEQLKSGTASVVCLLNNFYPREAKVQWKVDNALQSGNSQESVTEQDSKDSTYSLSSTLTLSKADYEKHKVYACEVTHQGLSSPVTKSFNRGECGGGGSEPKSSDKTHTCPPCPAPELLGGPSVFLFPPKPKDTLMISRTPEVTCVVVDVSHEDPEVKFNWYVDGVEVHNAKTKPREEQYNSTYRVVSVLTVLHQDWLNGKEYKCKVSNKALPAPIEKTISKAKGQPREPQVYTLPPCREEMTKNQVSLWCLVKGFYPSDIAVEWESNGQPENNYKTTPPVLDSDGSFFLYSKLTVDKSRWQQGNVFSCSVMHEALHNHYTQKSLSLSPGK

SEQ ID NO: 18 - protein, 446 aa, synthetic construct
  REGION 1..446: note = TraL-Q100C-Knob3
DIQMTQSPSSLSASVGDRVTITCRASQDVNTAVAWYQQKPGKAPKLLIYSASFLYSGVPSRFSGSRSGTDFTLTISSLQPEDFATYYCQQHYTTPPTFGCGTKVEIKRTVAAPSVFIFPPSDEQLKSGTASVVCLLNNFYPREAKVQWKVDNALQSGNSQESVTEQDSKDSTYSLSSTLTLSKADYEKHKVYACEVTHQGLSSPVTKSFNRGECEPKSSDKTHTCPPCPAPELLGGPSVFLFPPKPKDTLMISRTPEVTCVVVDVSHEDPEVKFNWYVDGVEVHNAKTKPREEQYNSTYRVVSVLTVLHQDWLNGKEYKCKVSNKALPAPIEKTISKAKGQPREPQVYTLPPCREEMTKNQVSLWCLVKGFYPSDIAVEWESNGQPENNYKTTPPVLDSDGSFFLYSKLTVDKSRWQQGNVFSCSVMHEALHNHYTQKSLSLSPGK

SEQ ID NO: 19 - protein, 120 aa, synthetic construct
  REGION 1..120: note = H01 VH
EVQLVESGGGLVQPGGSLRLSCAASGFNIKDTYIHWVRQAPGKCLEWVARIYPTNGYTRYADSVKGRFTISADTSKNTAYLQMNSLRAEDTAVYYCSRWGGDGFYAMDYWGQGTLVTVSS

SEQ ID NO: 20 - protein, 120 aa, synthetic construct; identical to SEQ ID NO: 19
  REGION 1..120: note = H01 VL

SEQ ID NO: 21 - protein, 5 aa, synthetic construct
  REGION 1..5: note = CDR-H1 of H01
DTYIH

SEQ ID NO: 22 - protein, 17 aa, synthetic construct
  REGION 1..17: note = CDR-H2 of H01
RIYPTNGYTRYADSVKG

SEQ ID NO: 23 - protein, 11 aa, synthetic construct
  REGION 1..11: note = CDR-H3 of H01
WGGDGFYAMDY

SEQ ID NO: 24 - protein, 11 aa, synthetic construct
  REGION 1..11: note = CDR-L1 of H01
RASQDVNTAVA

SEQ ID NO: 25 - protein, 7 aa, synthetic construct
  REGION 1..7: note = CDR-L2 of H01
SASFLYS

SEQ ID NO: 26 - protein, 9 aa, synthetic construct
  REGION 1..9: note = CDR-L3 of H01
QQHYTTPPT

SEQ ID NO: 27 - protein, 119 aa, synthetic construct [sequence omitted]

SEQ ID NO: 28 - protein, 107 aa, synthetic construct [sequence omitted]

SEQ ID NO: 29 - protein, 449 aa, synthetic construct
  REGION 1..449: note = PerH-G44C-Knob
EVQLVESGGGLVQPGGSLRLSCAASGFTFTDYTMDWVRQAPGKCLEWVADVNPNSGGSIYNQRFKGRFTLSVDRSKNTLYLQMNSLRAEDTAVYYCARNLGPSFYFDYWGQGTLVTVSSASTKGPSVFPLAPSSKSTSGGTAALGCLVKDYFPEPVTVSWNSGALTSGVHTFPAVLQSSGLYSLSSVVTVPSSSLGTQTYICNVNHKPSNTKVDKKVEPKSCDKTHTCPPCPAPELLGGPSVFLFPPKPKDTLMISRTPEVTCVVVDVSHEDPEVKFNWYVDGVEVHNAKTKPREEQYNSTYRVVSVLTVLHQDWLNGKEYKCKVSNKALPAPIEKTISKAKGQPREPQVYTLPPCREEMTKNQVSLWCLVKGFYPSDIAVEWESNGQPENNYKTTPPVLDSDGSFFLYSKLTVDKSRWQQGNVFSCSVMHEALHNHYTQKSLSLSPGK

SEQ ID NO: 30 - protein, 461 aa, synthetic construct
  REGION 1..461: note = PerL-Q100C-Knob
DIQMTQSPSSLSASVGDRVTITCKASQDVSIGVAWYQQKPGKAPKLLIYSASYRYTGVPSRFSGSGSGTDFTLTISSLQPEDFATYYCQQYYIYPYTFGCGTKVEIKRTVAAPSVFIFPPSDEQLKSGTASVVCLLNNFYPREAKVQWKVDNALQSGNSQESVTEQDSKDSTYSLSSTLTLSKADYEKHKVYACEVTHQGLSSPVTKSFNRGECGGGGSGGGGSGGGGSEPKSSDKTHTCPPCPAPELLGGPSVFLFPPKPKDTLMISRTPEVTCVVVDVSHEDPEVKFNWYVDGVEVHNAKTKPREEQYNSTYRVVSVLTVLHQDWLNGKEYKCKVSNKALPAPIEKTISKAKGQPREPQVYTLPPCREEMTKNQVSLWCLVKGFYPSDIAVEWESNGQPENNYKTTPPVLDSDGSFFLYSKLTVDKSRWQQGNVFSCSVMHEALHNHYTQKSLSLSPGK

SEQ ID NO: 31 - protein, 119 aa, synthetic construct
  REGION 1..119: note = P01 VH
EVQLVESGGGLVQPGGSLRLSCAASGFTFTDYTMDWVRQAPGKCLEWVADVNPNSGGSIYNQRFKGRFTLSVDRSKNTLYLQMNSLRAEDTAVYYCARNLGPSFYFDYWGQGTLVTVSS

SEQ ID NO: 32 - protein, 107 aa, synthetic construct
  REGION 1..107: note = P01 VL
DIQMTQSPSSLSASVGDRVTITCKASQDVSIGVAWYQQKPGKAPKLLIYSASYRYTGVPSRFSGSGSGTDFTLTISSLQPEDFATYYCQQYYIYPYTFGCGTKVEIK

SEQ ID NO: 33 - protein, 5 aa, synthetic construct
  REGION 1..5: note = CDR-H1 of P01 VH
DYTMD

SEQ ID NO: 34 - protein, 17 aa, synthetic construct
  REGION 1..17: note = CDR-H2 of P01 VH
DVNPNSGGSIYNQRFKG

SEQ ID NO: 35 - protein, 10 aa, synthetic construct
  REGION 1..10: note = CDR-H3 of P01 VH
NLGPSFYFDY

SEQ ID NO: 36 - protein, 11 aa, synthetic construct
  REGION 1..11: note = CDR-L1 of P01 VL
KASQDVSIGVA

SEQ ID NO: 37 - protein, 7 aa, synthetic construct
  REGION 1..7: note = CDR-L2 of P01 VL
SASYRYT

SEQ ID NO: 38 - protein, 9 aa, synthetic construct
  REGION 1..9: note = CDR-L3 of P01 VL
QQYYIYPYT

SEQ ID NO: 39 - protein, 227 aa, synthetic construct
  REGION 1..227: note = wtFc
DKTHTCPPCPAPELLGGPSVFLFPPKPKDTLMISRTPEVTCVVVDVSHEDPEVKFNWYVDGVEVHNAKTKPREEQYNSTYRVVSVLTVLHQDWLNGKEYKCKVSNKALPAPIEKTISKAKGQPREPQVYTLPPSREEMTKNQVSLTCLVKGFYPSDIAVEWESNGQPENNYKTTPPVLDSDGSFFLYSKLTVDKSRWQQGNVFSCSVMHEALHNHYTQKSLSLSPGK

SEQ ID NO: 40 - protein, 450 aa, synthetic construct
  REGION 1..450: note = TraH-G44C-wtFc
EVQLVESGGGLVQPGGSLRLSCAASGFNIKDTYIHWVRQAPGKCLEWVARIYPTNGYTRYADSVKGRFTISADTSKNTAYLQMNSLRAEDTAVYYCSRWGGDGFYAMDYWGQGTLVTVSSASTKGPSVFPLAPSSKSTSGGTAALGCLVKDYFPEPVTVSWNSGALTSGVHTFPAVLQSSGLYSLSSVVTVPSSSLGTQTYICNVNHKPSNTKVDKKVEPKSCDKTHTCPPCPAPELLGGPSVFLFPPKPKDTLMISRTPEVTCVVVDVSHEDPEVKFNWYVDGVEVHNAKTKPREEQYNSTYRVVSVLTVLHQDWLNGKEYKCKVSNKALPAPIEKTISKAKGQPREPQVYTLPPSREEMTKNQVSLTCLVKGFYPSDIAVEWESNGQPENNYKTTPPVLDSDGSFFLYSKLTVDKSRWQQGNVFSCSVMHEALHNHYTQKSLSLSPGK

SEQ ID NO: 41 - protein, 461 aa, synthetic construct
  REGION 1..461: note = TraL-Q100C-wtFc
DIQMTQSPSSLSASVGDRVTITCRASQDVNTAVAWYQQKPGKAPKLLIYSASFLYSGVPSRFSGSRSGTDFTLTISSLQPEDFATYYCQQHYTTPPTFGCGTKVEIKRTVAAPSVFIFPPSDEQLKSGTASVVCLLNNFYPREAKVQWKVDNALQSGNSQESVTEQDSKDSTYSLSSTLTLSKADYEKHKVYACEVTHQGLSSPVTKSFNRGECGGGGSGGGGSGGGGSEPKSSDKTHTCPPCPAPELLGGPSVFLFPPKPKDTLMISRTPEVTCVVVDVSHEDPEVKFNWYVDGVEVHNAKTKPREEQYNSTYRVVSVLTVLHQDWLNGKEYKCKVSNKALPAPIEKTISKAKGQPREPQVYTLPPSREEMTKNQVSLTCLVKGFYPSDIAVEWESNGQPENNYKTTPPVLDSDGSFFLYSKLTVDKSRWQQGNVFSCSVMHEALHNHYTQKSLSLSPGK

SEQ ID NO: 42 - protein, 227 aa, synthetic construct
  REGION 1..227: note = Fc-Hole-S239D-I332E
DKTHTCPPCPAPELLGGPDVFLFPPKPKDTLMISRTPEVTCVVVDVSHEDPEVKFNWYVDGVEVHNAKTKPREEQYNSTYRVVSVLTVLHQDWLNGKEYKCKVSNKALPAPEEKTISKAKGQPREPQVCTLPPSREEMTKNQVSLSCAVKGFYPSDIAVEWESNGQPENNYKTTPPVLDSDGSFFLVSKLTVDKSRWQQGNVFSCSVMHEALHNHYTQKSLSLSPGK

SEQ ID NO: 43 - protein, 450 aa, synthetic construct
  REGION 1..450: note = TraH-G44C-Knob-S239D-I332E
EVQLVESGGGLVQPGGSLRLSCAASGFNIKDTYIHWVRQAPGKCLEWVARIYPTNGYTRYADSVKGRFTISADTSKNTAYLQMNSLRAEDTAVYYCSRWGGDGFYAMDYWGQGTLVTVSSASTKGPSVFPLAPSSKSTSGGTAALGCLVKDYFPEPVTVSWNSGALTSGVHTFPAVLQSSGLYSLSSVVTVPSSSLGTQTYICNVNHKPSNTKVDKKVEPKSCDKTHTCPPCPAPELLGGPDVFLFPPKPKDTLMISRTPEVTCVVVDVSHEDPEVKFNWYVDGVEVHNAKTKPREEQYNSTYRVVSVLTVLHQDWLNGKEYKCKVSNKALPAPEEKTISKAKGQPREPQVYTLPPCREEMTKNQVSLWCLVKGFYPSDIAVEWESNGQPENNYKTTPPVLDSDGSFFLYSKLTVDKSRWQQGNVFSCSVMHEALHNHYTQKSLSLSPGK

SEQ ID NO: 44 - protein, 461 aa, synthetic construct
  REGION 1..461: note = TraL-Q100C-Knob-S239D-I332E
DIQMTQSPSSLSASVGDRVTITCRASQDVNTAVAWYQQKPGKAPKLLIYSASFLYSGVPSRFSGSRSGTDFTLTISSLQPEDFATYYCQQHYTTPPTFGCGTKVEIKRTVAAPSVFIFPPSDEQLKSGTASVVCLLNNFYPREAKVQWKVDNALQSGNSQESVTEQDSKDSTYSLSSTLTLSKADYEKHKVYACEVTHQGLSSPVTKSFNRGECGGGGSGGGGSGGGGSEPKSSDKTHTCPPCPAPELLGGPDVFLFPPKPKDTLMISRTPEVTCVVVDVSHEDPEVKFNWYVDGVEVHNAKTKPREEQYNSTYRVVSVLTVLHQDWLNGKEYKCKVSNKALPAPEEKTISKAKGQPREPQVYTLPPCREEMTKNQVSLWCLVKGFYPSDIAVEWESNGQPENNYKTTPPVLDSDGSFFLYSKLTVDKSRWQQGNVFSCSVMHEALHNHYTQKSLSLSPGK

SEQ ID NO: 45 - protein, 449 aa, synthetic construct
  REGION 1..449: note = PerH-G44C-Knob-S239D-I332E
EVQLVESGGGLVQPGGSLRLSCAASGFTFTDYTMDWVRQAPGKCLEWVADVNPNSGGSIYNQRFKGRFTLSVDRSKNTLYLQMNSLRAEDTAVYYCARNLGPSFYFDYWGQGTLVTVSSASTKGPSVFPLAPSSKSTSGGTAALGCLVKDYFPEPVTVSWNSGALTSGVHTFPAVLQSSGLYSLSSVVTVPSSSLGTQTYICNVNHKPSNTKVDKKVEPKSCDKTHTCPPCPAPELLGGPDVFLFPPKPKDTLMISRTPEVTCVVVDVSHEDPEVKFNWYVDGVEVHNAKTKPREEQYNSTYRVVSVLTVLHQDWLNGKEYKCKVSNKALPAPEEKTISKAKGQPREPQVYTLPPCREEMTKNQVSLWCLVKGFYPSDIAVEWESNGQPENNYKTTPPVLDSDGSFFLYSKLTVDKSRWQQGNVFSCSVMHEALHNHYTQKSLSLSPGK

SEQ ID NO: 46 - protein, 461 aa, synthetic construct
  REGION 1..461: note = PerL-Q100C-Knob-S239D-I332E
DIQMTQSPSSLSASVGDRVTITCKASQDVSIGVAWYQQKPGKAPKLLIYSASYRYTGVPSRFSGSGSGTDFTLTISSLQPEDFATYYCQQYYIYPYTFGCGTKVEIKRTVAAPSVFIFPPSDEQLKSGTASVVCLLNNFYPREAKVQWKVDNALQSGNSQESVTEQDSKDSTYSLSSTLTLSKADYEKHKVYACEVTHQGLSSPVTKSFNRGECGGGGSGGGGSGGGGSEPKSSDKTHTCPPCPAPELLGGPDVFLFPPKPKDTLMISRTPEVTCVVVDVSHEDPEVKFNWYVDGVEVHNAKTKPREEQYNSTYRVVSVLTVLHQDWLNGKEYKCKVSNKALPAPEEKTISKAKGQPREPQVYTLPPCREEMTKNQVSLWCLVKGFYPSDIAVEWESNGQPENNYKTTPPVLDSDGSFFLYSKLTVDKSRWQQGNVFSCSVMHEALHNHYTQKSLSLSPGK

SEQ ID NO: 47 - protein, 6 aa, synthetic construct
  REGION 1..6: note = VH-S-Linker
ASTKGP

SEQ ID NO: 48 - protein, 13 aa, synthetic construct
  REGION 1..13: note = VH-L-Linker
ASTKGPSVFPLAP

SEQ ID NO: 49 - protein, 6 aa, synthetic construct
  REGION 1..6: note = VL-S-Linker
RTVAAP

SEQ ID NO: 50 - protein, 13 aa, synthetic construct
  REGION 1..13: note = VL-L-Linker
RTVAAPSVFIFPP

SEQ ID NO: 51 - protein, 575 aa, synthetic construct
  REGION 1..575: note = TH-S-PH-Knob
EVQLVESGGGLVQPGGSLRLSCAASGFNIKDTYIHWVRQAPGKGLEWVARIYPTNGYTRYADSVKGRFTISADTSKNTAYLQMNSLRAEDTAVYYCSRWGGDGFYAMDYWGQGTLVTVSSASTKGPEVQLVESGGGLVQPGGSLRLSCAASGFTFTDYTMDWVRQAPGKGLEWVADVNPNSGGSIYNQRFKGRFTLSVDRSKNTLYLQMNSLRAEDTAVYYCARNLGPSFYFDYWGQGTLVTVSSASTKGPSVFPLAPSSKSTSGGTAALGCLVKDYFPEPVTVSWNSGALTSGVHTFPAVLQSSGLYSLSSVVTVPSSSLGTQTYICNVNHKPSNTKVDKKVEPKSCDKTHTCPPCPAPELLGGPSVFLFPPKPKDTLMISRTPEVTCVVVDVSHEDPEVKFNWYVDGVEVHNAKTKPREEQYNSTYRVVSVLTVLHQDWLNGKEYKCKVSNKALPAPIEKTISKAKGQPREPQVYTLPPCREEMTKNQVSLWCLVKGFYPSDIAVEWESNGQPENNYKTTPPVLDSDGSFFLYSKLTVDKSRWQQGNVFSCSVMHEALHNHYTQKSLSLSPGK

SEQ ID NO: 52 - protein, 575 aa, synthetic construct
  REGION 1..575: note = THC-S-PH-Knob
EVQLVESGGGLVQPGGSLRLSCAASGFNIKDTYIHWVRQAPGKCLEWVARIYPTNGYTRYADSVKGRFTISADTSKNTAYLQMNSLRAEDTAVYYCSRWGGDGFYAMDYWGQGTLVTVSSASTKGPEVQLVESGGGLVQPGGSLRLSCAASGFTFTDYTMDWVRQAPGKGLEWVADVNPNSGGSIYNQRFKGRFTLSVDRSKNTLYLQMNSLRAEDTAVYYCARNLGPSFYFDYWGQGTLVTVSSASTKGPSVFPLAPSSKSTSGGTAALGCLVKDYFPEPVTVSWNSGALTSGVHTFPAVLQSSGLYSLSSVVTVPSSSLGTQTYICNVNHKPSNTKVDKKVEPKSCDKTHTCPPCPAPELLGGPSVFLFPPKPKDTLMISRTPEVTCVVVDVSHEDPEVKFNWYVDGVEVHNAKTKPREEQYNSTYRVVSVLTVLHQDWLNGKEYKCKVSNKALPAPIEKTISKAKGQPREPQVYTLPPCREEMTKNQVSLWCLVKGFYPSDIAVEWESNGQPENNYKTTPPVLDSDGSFFLYSKLTVDKSRWQQGNVFSCSVMHEALHNHYTQKSLSLSPGK

SEQ ID NO: 53 - protein, 575 aa, synthetic construct
  REGION 1..575: note = TH-S-PHC-Knob
EVQLVESGGGLVQPGGSLRLSCAASGFNIKDTYIHWVRQAPGKGLEWVARIYPTNGYTRYADSVKGRFTISADTSKNTAYLQMNSLRAEDTAVYYCSRWGGDGFYAMDYWGQGTLVTVSSASTKGPEVQLVESGGGLVQPGGSLRLSCAASGFTFTDYTMDWVRQAPGKCLEWVADVNPNSGGSIYNQRFKGRFTLSVDRSKNTLYLQMNSLRAEDTAVYYCARNLGPSFYFDYWGQGTLVTVSSASTKGPSVFPLAPSSKSTSGGTAALGCLVKDYFPEPVTVSWNSGALTSGVHTFPAVLQSSGLYSLSSVVTVPSSSLGTQTYICNVNHKPSNTKVDKKVEPKSCDKTHTCPPCPAPELLGGPSVFLFPPKPKDTLMISRTPEVTCVVVDVSHEDPEVKFNWYVDGVEVHNAKTKPREEQYNSTYRVVSVLTVLHQDWLNGKEYKCKVSNKALPAPIEKTISKAKGQPREPQVYTLPPCREEMTKNQVSLWCLVKGFYPSDIAVEWESNGQPENNYKTTPPVLDSDGSFFLYSKLTVDKSRWQQGNVFSCSVMHEALHNHYTQKSLSLSPGK

SEQ ID NO: 54 - protein, 575 aa, synthetic construct
  REGION 1..575: note = THC-S-PHC-Knob
EVQLVESGGGLVQPGGSLRLSCAASGFNIKDTYIHWVRQAPGKCLEWVARIYPTNGYTRYADSVKGRFTISADTSKNTAYLQMNSLRAEDTAVYYCSRWGGDGFYAMDYWGQGTLVTVSSASTKGPEVQLVESGGGLVQPGGSLRLSCAASGFTFTDYTMDWVRQAPGKCLEWVADVNPNSGGSIYNQRFKGRFTLSVDRSKNTLYLQMNSLRAEDTAVYYCARNLGPSFYFDYWGQGTLVTVSSASTKGPSVFPLAPSSKSTSGGTAALGCLVKDYFPEPVTVSWNSGALTSGVHTFPAVLQSSGLYSLSSVVTVPSSSLGTQTYICNVNHKPSNTKVDKKVEPKSCDKTHTCPPCPAPELLGGPSVFLFPPKPKDTLMISRTPEVTCVVVDVSHEDPEVKFNWYVDGVEVHNAKTKPREEQYNSTYRVVSVLTVLHQDWLNGKEYKCKVSNKALPAPIEKTISKAKGQPREPQVYTLPPCREEMTKNQVSLWCLVKGFYPSDIAVEWESNGQPENNYKTTPPVLDSDGSFFLYSKLTVDKSRWQQGNVFSCSVMHEALHNHYTQKSLSLSPGK

SEQ ID NO: 55 - protein, 582 aa, synthetic construct
  REGION 1..582: note = TH-L-PH-Knob
EVQLVESGGGLVQPGGSLRLSCAASGFNIKDTYIHWVRQAPGKGLEWVARIYPTNGYTRYADSVKGRFTISADTSKNTAYLQMNSLRAEDTAVYYCSRWGGDGFYAMDYWGQGTLVTVSSASTKGPSVFPLAPEVQLVESGGGLVQPGGSLRLSCAASGFTFTDYTMDWVRQAPGKGLEWVADVNPNSGGSIYNQRFKGRFTLSVDRSKNTLYLQMNSLRAEDTAVYYCARNLGPSFYFDYWGQGTLVTVSSASTKGPSVFPLAPSSKSTSGGTAALGCLVKDYFPEPVTVSWNSGALTSGVHTFPAVLQSSGLYSLSSVVTVPSSSLGTQTYICNVNHKPSNTKVDKKVEPKSCDKTHTCPPCPAPELLGGPSVFLFPPKPKDTLMISRTPEVTCVVVDVSHEDPEVKFNWYVDGVEVHNAKTKPREEQYNSTYRVVSVLTVLHQDWLNGKEYKCKVSNKALPAPIEKTISKAKGQPREPQVYTLPPCREEMTKNQVSLWCLVKGFYPSDIAVEWESNGQPENNYKTTPPVLDSDGSFFLYSKLTVDKSRWQQGNVFSCSVMHEALHNHYTQKSLSLSPGK

SEQ ID NO: 56 - protein, 582 aa, synthetic construct
  REGION 1..582: note = THC-L-PH-Knob
EVQLVESGGGLVQPGGSLRLSCAASGFNIKDTYIHWVRQAPGKCLEWVARIYPTNGYTRYADSVKGRFTISADTSKNTAYLQMNSLRAEDTAVYYCSRWGGDGFYAMDYWGQGTLVTVSSASTKGPSVFPLAPEVQLVESGGGLVQPGGSLRLSCAASGFTFTDYTMDWVRQAPGKGLEWVADVNPNSGGSIYNQRFKGRFTLSVDRSKNTLYLQMNSLRAEDTAVYYCARNLGPSFYFDYWGQGTLVTVSSASTKGPSVFPLAPSSKSTSGGTAALGCLVKDYFPEPVTVSWNSGALTSGVHTFPAVLQSSGLYSLSSVVTVPSSSLGTQTYICNVNHKPSNTKVDKKVEPKSCDKTHTCPPCPAPELLGGPSVFLFPPKPKDTLMISRTPEVTCVVVDVSHEDPEVKFNWYVDGVEVHNAKTKPREEQYNSTYRVVSVLTVLHQDWLNGKEYKCKVSNKALPAPIEKTISKAKGQPREPQVYTLPPCREEMTKNQVSLWCLVKGFYPSDIAVEWESNGQPENNYKTTPPVLDSDGSFFLYSKLTVDKSRWQQGNVFSCSVMHEALHNHYTQKSLSLSPGK

SEQ ID NO: 57 - protein, 582 aa, synthetic construct
  REGION 1..582: note = TH-L-PHC-Knob
EVQLVESGGGLVQPGGSLRLSCAASGFNIKDTYIHWVRQAPGKGLEWVARIYPTNGYTRYADSVKGRFTISADTSKNTAYLQMNSLRAEDTAVYYCSRWGGDGFYAMDYWGQGTLVTVSSASTKGPSVFPLAPEVQLVESGGGLVQPGGSLRLSCAASGFTFTDYTMDWVRQAPGKCLEWVADVNPNSGGSIYNQRFKGRFTLSVDRSKNTLYLQMNSLRAEDTAVYYCARNLGPSFYFDYWGQGTLVTVSSASTKGPSVFPLAPSSKSTSGGTAALGCLVKDYFPEPVTVSWNSGALTSGVHTFPAVLQSSGLYSLSSVVTVPSSSLGTQTYICNVNHKPSNTKVDKKVEPKSCDKTHTCPPCPAPELLGGPSVFLFPPKPKDTLMISRTPEVTCVVVDVSHEDPEVKFNWYVDGVEVHNAKTKPREEQYNSTYRVVSVLTVLHQDWLNGKEYKCKVSNKALPAPIEKTISKAKGQPREPQVYTLPPCREEMTKNQVSLWCLVKGFYPSDIAVEWESNGQPENNYKTTPPVLDSDGSFFLYSKLTVDKSRWQQGNVFSCSVMHEALHNHYTQKSLSLSPGK

SEQ ID NO: 58 - protein, 582 aa, synthetic construct
  REGION 1..582: note = THC-L-PHC-Knob
EVQLVESGGGLVQPGGSLRLSCAASGFNIKDTYIHWVRQAPGKCLEWVARIYPTNGYTRYADSVKGRFTISADTSKNTAYLQMNSLRAEDTAVYYCSRWGGDGFYAMDYWGQGTLVTVSSASTKGPSVFPLAPEVQLVESGGGLVQPGGSLRLSCAASGFTFTDYTMDWVRQAPGKCLEWVADVNPNSGGSIYNQRFKGRFTLSVDRSKNTLYLQMNSLRAEDTAVYYCARNLGPSFYFDYWGQGTLVTVSSASTKGPSVFPLAPSSKSTSGGTAALGCLVKDYFPEPVTVSWNSGALTSGVHTFPAVLQSSGLYSLSSVVTVPSSSLGTQTYICNVNHKPSNTKVDKKVEPKSCDKTHTCPPCPAPELLGGPSVFLFPPKPKDTLMISRTPEVTCVVVDVSHEDPEVKFNWYVDGVEVHNAKTKPREEQYNSTYRVVSVLTVLHQDWLNGKEYKCKVSNKALPAPIEKTISKAKGQPREPQVYTLPPCREEMTKNQVSLWCLVKGFYPSDIAVEWESNGQPENNYKTTPPVLDSDGSFFLYSKLTVDKSRWQQGNVFSCSVMHEALHNHYTQKSLSLSPGK

SEQ ID NO: 59 - protein, 574 aa, synthetic construct
  REGION 1..574: note = TL-S-PL-Knob
DIQMTQSPSSLSASVGDRVTITCRASQDVNTAVAWYQQKPGKAPKLLIYSASFLYSGVPSRFSGSRSGTDFTLTISSLQPEDFATYYCQQHYTTPPTFGQGTKVEIKRTVAAPDIQMTQSPSSLSASVGDRVTITCKASQDVSIGVAWYQQKPGKAPKLLIYSASYRYTGVPSRFSGSGSGTDFTLTISSLQPEDFATYYCQQYYIYPYTFGQGTKVEIKRTVAAPSVFIFPPSDEQLKSGTASVVCLLNNFYPREAKVQWKVDNALQSGNSQESVTEQDSKDSTYSLSSTLTLSKADYEKHKVYACEVTHQGLSSPVTKSFNRGECGGGGSGGGGSGGGGSEPKSSDKTHTCPPCPAPELLGGPSVFLFPPKPKDTLMISRTPEVTCVVVDVSHEDPEVKFNWYVDGVEVHNAKTKPREEQYNSTYRVVSVLTVLHQDWLNGKEYKCKVSNKALPAPIEKTISKAKGQPREPQVYTLPPCREEMTKNQVSLWCLVKGFYPSDIAVEWESNGQPENNYKTTPPVLDSDGSFFLYSKLTVDKSRWQQGNVFSCSVMHEALHNHYTQKSLSLSPGK

SEQ ID NO: 60 - protein, 574 aa, synthetic construct
  REGION 1..574: note = TLC-S-PL-Knob
DIQMTQSPSSLSASVGDRVTITCRASQDVNTAVAWYQQKPGKAPKLLIYSASFLYSGVPSRFSGSRSGTDFTLTISSLQPEDFATYYCQQHYTTPPTFGCGTKVEIKRTVAAPDIQMTQSPSSLSASVGDRVTITCKASQDVSIGVAWYQQKPGKAPKLLIYSASYRYTGVPSRFSGSGSGTDFTLTISSLQPEDFATYYCQQYYIYPYTFGQGTKVEIKRTVAAPSVFIFPPSDEQLKSGTASVVCLLNNFYPREAKVQWKVDNALQSGNSQESVTEQDSKDSTYSLSSTLTLSKADYEKHKVYACEVTHQGLSSPVTKSFNRGECGGGGSGGGGSGGGGSEPKSSDKTHTCPPCPAPELLGGPSVFLFPPKPKDTLMISRTPEVTCVVVDVSHEDPEVKFNWYVDGVEVHNAKTKPREEQYNSTYRVVSVLTVLHQDWLNGKEYKCKVSNKALPAPIEKTISKAKGQPREPQVYTLPPCREEMTKNQVSLWCLVKGFYPSDIAVEWESNGQPENNYKTTPPVLDSDGSFFLYSKLTVDKSRWQQGNVFSCSVMHEALHNHYTQKSLSLSPGK

SEQ ID NO: 61 - protein, 574 aa, synthetic construct
  REGION 1..574: note = TL-S-PLC-Knob
DIQMTQSPSSLSASVGDRVTITCRASQDVNTAVAWYQQKPGKAPKLLIYSASFLYSGVPSRFSGSRSGTDFTLTISSLQPEDFATYYCQQHYTTPPTFGQGTKVEIKRTVAAPDIQMTQSPSSLSASVGDRVTITCKASQDVSIGVAWYQQKPGKAPKLLIYSASYRYTGVPSRFSGSGSGTDFTLTISSLQPEDFATYYCQQYYIYPYTFGCGTKVEIKRTVAAPSVFIFPPSDEQLKSGTASVVCLLNNFYPREAKVQWKVDNALQSGNSQESVTEQDSKDSTYSLSSTLTLSKADYEKHKVYACEVTHQGLSSPVTKSFNRGECGGGGSGGGGSGGGGSEPKSSDKTHTCPPCPAPELLGGPSVFLFPPKPKDTLMISRTPEVTCVVVDVSHEDPEVKFNWYVDGVEVHNAKTKPREEQYNSTYRVVSVLTVLHQDWLNGKEYKCKVSNKALPAPIEKTISKAKGQPREPQVYTLPPCREEMTKNQVSLWCLVKGFYPSDIAVEWESNGQPENNYKTTPPVLDSDGSFFLYSKLTVDKSRWQQGNVFSCSVMHEALHNHYTQKSLSLSPGK

SEQ ID NO: 62 - protein, 574 aa, synthetic construct
  REGION 1..574: note = TLC-S-PLC-Knob
DIQMTQSPSSLSASVGDRVTITCRASQDVNTAVAWYQQKPGKAPKLLIYSASFLYSGVPSRFSGSRSGTDFTLTISSLQPEDFATYYCQQHYTTPPTFGCGTKVEIKRTVAAPDIQMTQSPSSLSASVGDRVTITCKASQDVSIGVAWYQQKPGKAPKLLIYSASYRYTGVPSRFSGSGSGTDFTLTISSLQPEDFATYYCQQYYIYPYTFGCGTKVEIKRTVAAPSVFIFPPSDEQLKSGTASVVCLLNNFYPREAKVQWKVDNALQSGNSQESVTEQDSKDSTYSLSSTLTLSKADYEKHKVYACEVTHQGLSSPVTKSFNRGECGGGGSGGGGSGGGGSEPKSSDKTHTCPPCPAPELLGGPSVFLFPPKPKDTLMISRTPEVTCVVVDVSHEDPEVKFNWYVDGVEVHNAKTKPREEQYNSTYRVVSVLTVLHQDWLNGKEYKCKVSNKALPAPIEKTISKAKGQPREPQVYTLPPCREEMTKNQVSLWCLVKGFYPSDIAVEWESNGQPENNYKTTPPVLDSDGSFFLYSKLTVDKSRWQQGNVFSCSVMHEALHNHYTQKSLSLSPGK

SEQ ID NO: 63 - protein, 581 aa, synthetic construct
  REGION 1..581: note = TL-L-PL-Knob
DIQMTQSPSSLSASVGDRVTITCRASQDVNTAVAWYQQKPGKAPKLLIYSASFLYSGVPSRFSGSRSGTDFTLTISSLQPEDFATYYCQQHYTTPPTFGQGTKVEIKRTVAAPSVFIFPPDIQMTQSPSSLSASVGDRVTITCKASQDVSIGVAWYQQKPGKAPKLLIYSASYRYTGVPSRFSGSGSGTDFTLTISSLQPEDFATYYCQQYYIYPYTFGQGTKVEIKRTVAAPSVFIFPPSDEQLKSGTASVVCLLNNFYPREAKVQWKVDNALQSGNSQESVTEQDSKDSTYSLSSTLTLSKADYEKHKVYACEVTHQGLSSPVTKSFNRGECGGGGSGGGGSGGGGSEPKSSDKTHTCPPCPAPELLGGPSVFLFPPKPKDTLMISRTPEVTCVVVDVSHEDPEVKFNWYVDGVEVHNAKTKPREEQYNSTYRVVSVLTVLHQDWLNGKEYKCKVSNKALPAPIEKTISKAKGQPREPQVYTLPPCREEMTKNQVSLWCLVKGFYPSDIAVEWESNGQPENNYKTTPPVLDSDGSFFLYSKLTVDKSRWQQGNVFSCSVMHEALHNHYTQKSLSLSPGK

SEQ ID NO: 64 - protein, 581 aa, synthetic construct
  REGION 1..581: note = TLC-L-PL-Knob
DIQMTQSPSSLSASVGDRVTITCRASQDVNTAVAWYQQKPGKAPKLLIYSASFLYSGVPSRFSGSRSGTDFTLTISSLQPEDFATYYCQQHYTTPPTFGCGTKVEIKRTVAAPSVFIFPPDIQMTQSPSSLSASVGDRVTITCKASQDVSIGVAWYQQKPGKAPKLLIYSASYRYTGVPSRFSGSGSGTDFTLTISSLQPEDFATYYCQQYYIYPYTFGQGTKVEIKRTVAAPSVFIFPPSDEQLKSGTASVVCLLNNFYPREAKVQWKVDNALQSGNSQESVTEQDSKDSTYSLSSTLTLSKADYEKHKVYACEVTHQGLSSPVTKSFNRGECGGGGSGGGGSGGGGSEPKSSDKTHTCPPCPAPELLGGPSVFLFPPKPKDTLMISRTPEVTCVVVDVSHEDPEVKFNWYVDGVEVHNAKTKPREEQYNSTYRVVSVLTVLHQDWLNGKEYKCKVSNKALPAPIEKTISKAKGQPREPQVYTLPPCREEMTKNQVSLWCLVKGFYPSDIAVEWESNGQPENNYKTTPPVLDSDGSFFLYSKLTVDKSRWQQGNVFSCSVMHEALHNHYTQKSLSLSPGK

SEQ ID NO: 65 - protein, 581 aa, synthetic construct; identical to SEQ ID NO: 64
  REGION 1..581: note = TL-L-PLC-Knob

SEQ ID NO: 66 - protein, 581 aa, synthetic construct
  REGION 1..581: note = TLC-L-PLC-Knob
DIQMTQSPSSLSASVGDRVTITCRASQDVNTAVAWYQQKPGKAPKLLIYSASFLYSGVPSRFSGSRSGTDFTLTISSLQPEDFATYYCQQHYTTPPTFGCGTKVEIKRTVAAPSVFIFPPDIQMTQSPSSLSASVGDRVTITCKASQDVSIGVAWYQQKPGKAPKLLIYSASYRYTGVPSRFSGSGSGTDFTLTISSLQPEDFATYYCQQYYIYPYTFGCGTKVEIKRTVAAPSVFIFPPSDEQLKSGTASVVCLLNNFYPREAKVQWKVDNALQSGNSQESVTEQDSKDSTYSLSSTLTLSKADYEKHKVYACEVTHQGLSSPVTKSFNRGECGGGGSGGGGSGGGGSEPKSSDKTHTCPPCPAPELLGGPSVFLFPPKPKDTLMISRTPEVTCVVVDVSHEDPEVKFNWYVDGVEVHNAKTKPREEQYNSTYRVVSVLTVLHQDWLNGKEYKCKVSNKALPAPIEKTISKAKGQPREPQVYTLPPCREEMTKNQVSLWCLVKGFYPSDIAVEWESNGQPENNYKTTPPVLDSDGSFFLYSKLTVDKSRWQQGNVFSCSVMHEALHNHYTQKSLSLSPGK

SEQ ID NO: 67 - protein, 444 aa, synthetic construct
  REGION 1..444: note = GPM01 HC
EVQLVESGGGLVKPGGSLKLSCAASGFTFSRYAMSWVRQIPEKCLEWVAAIDSSGGDTYYLDTVKDRFTISRDNANNTLHLQMRSLRSEDTALYYCVRQGGAYWGQGTLVTVSSASTKGPSVFPLAPSSKSTSGGTAALGCLVKDYFPEPVTVSWNSGALTSGVHTFPAVLQSSGLYSLSSVVTVPSSSLGTQTYICNVNHKPSNTKVDKKVEPKSCDKTHTCPPCPAPELLGGPSVFLFPPKPKDTLMISRTPEVTCVVVDVSHEDPEVKFNWYVDGVEVHNAKTKPREEQYNSTYRVVSVLTVLHQDWLNGKEYKCKVSNKALPAPIEKTISKAKGQPREPQVYTLPPCREEMTKNQVSLWCLVKGFYPSDIAVEWESNGQPENNYKTTPPVLDSDGSFFLYSKLTVDKSRWQQGNVFSCSVMHEALHNHYTQKSLSLSPGK

SEQ ID NO: 68 - protein, 466 aa, synthetic construct
  REGION 1..466: note = GPM01 LC
DVVMTQTPLTLSVTIGQPASISCKSSQSLLDSDGKTYLNWLLQRPGQSPKRLIYLVSKLDSGAPDRFTGSGSGTDFTLKISRVEAEDLGIYYCWQGTHFPLTFGCGTKLEIKRTVAAPSVFIFPPSDEQLKSGTASVVCLLNNFYPREAKVQWKVDNALQSGNSQESVTEQDSKDSTYSLSSTLTLSKADYEKHKVYACEVTHQGLSSPVTKSFNRGECGGGGSGGGGSGGGGSEPKSSDKTHTCPPCPAPELLGGPSVFLFPPKPKDTLMISRTPEVTCVVVDVSHEDPEVKFNWYVDGVEVHNAKTKPREEQYNSTYRVVSVLTVLHQDWLNGKEYKCKVSNKALPAPIEKTISKAKGQPREPQVYTLPPCREEMTKNQVSLWCLVKGFYPSDIAVEWESNGQPENNYKTTPPVLDSDGSFFLYSKLTVDKSRWQQGNVFSCSVMHEALHNHYTQKSLSLSPGK

SEQ ID NO: 69 - protein, 445 aa, synthetic construct
  REGION 1..445: note = GPM02 HC
QVQLVQSGAEVKKPGASVKVSCKASGYTFTDYEMHWVRQAPGQCLEWMGALDPKTGDTAYSQKFKGRVTLTADKSTSTAYMELSSLTSEDTAVYYCTRFYSYTYWGQGTLVTVSSASTKGPSVFPLAPSSKSTSGGTAALGCLVKDYFPEPVTVSWNSGALTSGVHTFPAVLQSSGLYSLSSVVTVPSSSLGTQTYICNVNHKPSNTKVDKKVEPKSCDKTHTCPPCPAPELLGGPSVFLFPPKPKDTLMISRTPEVTCVVVDVSHEDPEVKFNWYVDGVEVHNAKTKPREEQYNSTYRVVSVLTVLHQDWLNGKEYKCKVSNKALPAPIEKTISKAKGQPREPQVYTLPPCREEMTKNQVSLWCLVKGFYPSDIAVEWESNGQPENNYKTTPPVLDSDGSFFLYSKLTVDKSRWQQGNVFSCSVMHEALHNHYTQKSLSLSPGK

SEQ ID NO: 70 - protein, 466 aa, synthetic construct
  REGION 1..466: note = GPM02 LC
DVVMTQSPLSLPVTPGEPASISCRSSQSLVHSNRNTYLHWYLQKPGQSPQLLIYKVSNRFSGVPDRFSGSGSGTDFTLKISRVEAEDVGVYYCSQNTHVPPTFGCGTKLEIKRTVAAPSVFIFPPSDEQLKSGTASVVCLLNNFYPREAKVQWKVDNALQSGNSQESVTEQDSKDSTYSLSSTLTLSKADYEKHKVYACEVTHQGLSSPVTKSFNRGECGGGGSGGGGSGGGGSEPKSSDKTHTCPPCPAPELLGGPSVFLFPPKPKDTLMISRTPEVTCVVVDVSHEDPEVKFNWYVDGVEVHNAKTKPREEQYNSTYRVVSVLTVLHQDWLNGKEYKCKVSNKALPAPIEKTISKAKGQPREPQVYTLPPCREEMTKNQVSLWCLVKGFYPSDIAVEWESNGQPENNYKTTPPVLDSDGSFFLYSKLTVDKSRWQQGNVFSCSVMHEALHNHYTQKSLSLSPGK

SEQ ID NO: 71 - protein, 453 aa, synthetic construct
  REGION 1..453: note = GPM04 HC
EVQLVETGGGLVQPKGSLKLSCAASGFTFNASAMNWVRQAPGKCLEWVARIRSKSNNYAIYYADSVKDRFTISRDDSQSMLYLQMNNLKTEDTAMYYCVRDPGYYGNPWFAYWGQGTLVTVSSASTKGPSVFPLAPSSKSTSGGTAALGCLVKDYFPEPVTVSWNSGALTSGVHTFPAVLQSSGLYSLSSVVTVPSSSLGTQTYICNVNHKPSNTKVDKKVEPKSCDKTHTCPPCPAPELLGGPSVFLFPPKPKDTLMISRTPEVTCVVVDVSHEDPEVKFNWYVDGVEVHNAKTKPREEQYNSTYRVVSVLTVLHQDWLNGKEYKCKVSNKALPAPIEKTISKAKGQPREPQVYTLPPCREEMTKNQVSLWCLVKGFYPSDIAVEWESNGQPENNYKTTPPVLDSDGSFFLYSKLTVDKSRWQQGNVFSCSVMHEALHNHYTQKSLSLSPGK

SEQ ID NO: 72 - protein, 460 aa, synthetic construct
  REGION 1..460: note = GPM04 LC
QIVLTQSPAIMSAFPGEKVTMTCSASSSVSYMYWYQQKSGSSPRLLIYDTSNLASGVPVRFSGSGSGTSYSLTISRMEAEDAATYYCQQWSSYPLTFGCGTKLEIKRTVAAPSVFIFPPSDEQLKSGTASVVCLLNNFYPREAKVQWKVDNALQSGNSQESVTEQDSKDSTYSLSSTLTLSKADYEKHKVYACEVTHQGLSSPVTKSFNRGECGGGGSGGGGSGGGGSEPKSSDKTHTCPPCPAPELLGGPSVFLFPPKPKDTLMISRTPEVTCVVVDVSHEDPEVKFNWYVDGVEVHNAKTKPREEQYNSTYRVVSVLTVLHQDWLNGKEYKCKVSNKALPAPIEKTISKAKGQPREPQVYTLPPCREEMTKNQVSLWCLVKGFYPSDIAVEWESNGQPENNYKTTPPVLDSDGSFFLYSKLTVDKSRWQQGNVFSCSVMHEALHNHYTQKSLSLSPGK

SEQ ID NO: 73 - protein, 572 aa, synthetic construct
  REGION 1..572: note = GPB01 HC
QVQLVQSGAEVKKPGASVKVSCKASGYTFTDYEMHWVRQAPGQGLEWMGALDPKTGDTAYSQKFKGRVTLTADKSTSTAYMELSSLTSEDTAVYYCTRFYSYTYWGQGTLVTVSSASTKGPSVFPLAPEVQLVESGGGLVKPGGSLKLSCAASGFTFSRYAMSWVRQIPEKCLEWVAAIDSSGGDTYYLDTVKDRFTISRDNANNTLHLQMRSLRSEDTALYYCVRQGGAYWGQGTLVTVSSASTKGPSVFPLAPSSKSTSGGTAALGCLVKDYFPEPVTVSWNSGALTSGVHTFPAVLQSSGLYSLSSVVTVPSSSLGTQTYICNVNHKPSNTKVDKKVEPKSCDKTHTCPPCPAPELLGGPSVFLFPPKPKDTLMISRTPEVTCVVVDVSHEDPEVKFNWYVDGVEVHNAKTKPREEQYNSTYRVVSVLTVLHQDWLNGKEYKCKVSNKALPAPIEKTISKAKGQPREPQVYTLPPCREEMTKNQVSLWCLVKGFYPSDIAVEWESNGQPENNYKTTPPVLDSDGSFFLYSKLTVDKSRWQQGNVFSCSVMHEALHNHYTQKSLSLSPGK

SEQ ID NO: 74 - protein, 591 aa, synthetic construct
  REGION 1..591: note = GPB01 LC
DVVMTQSPLSLPVTPGEPASISCRSSQSLVHSNRNTYLHWYLQKPGQSPQLLIYKVSNRFSGVPDRFSGSGSGTDFTLKISRVEAEDVGVYYCSQNTHVPPTFGQGTKLEIKRTVAAPSVFIFPPDVVMTQTPLTLSVTIGQPASISCKSSQSLLDSDGKTYLNWLLQRPGQSPKRLIYLVSKLDSGAPDRFTGSGSGTDFTLKISRVEAEDLGIYYCWQGTHFPLTFGCGTKLEIKRTVAAPSVFIFPPSDEQLKSGTASVVCLLNNFYPREAKVQWKVDNALQSGNSQESVTEQDSKDSTYSLSSTLTLSKADYEKHKVYACEVTHQGLSSPVTKSFNRGECGGGGSGGGGSGGGGSEPKSSDKTHTCPPCPAPELLGGPSVFLFPPKPKDTLMISRTPEVTCVVVDVSHEDPEVKFNWYVDGVEVHNAKTKPREEQYNSTYRVVSVLTVLHQDWLNGKEYKCKVSNKALPAPIEKTISKAKGQPREPQVYTLPPCREEMTKNQVSLWCLVKGFYPSDIAVEWESNGQPENNYKTTPPVLDSDGSFFLYSKLTVDKSRWQQGNVFSCSVMHEALHNHYTQKSLSLSPGK

SEQ ID NO: 75 - protein, 581 aa, synthetic construct
  REGION 1..581: note = GPB03 HC
QVQLVQSGAEVKKPGASVKVSCKASGYTFTDYEMHWVRQAPGQGLEWMGALDPKTGDTAYSQKFKGRVTLTADKSTSTAYMELSSLTSEDTAVYYCTRFYSYTYWGQGTLVTVSSASTKGPSVFPLAPEVQLVETGGGLVQPKGSLKLSCAASGFTFNASAMNWVRQAPGKCLEWVARIRSKSNNYAIYYADSVKDRFTISRDDSQSMLYLQMNNLKTEDTAMYYCVRDPGYYGNPWFAYWGQGTLVTVSSASTKGPSVFPLAPSSKSTSGGTAALGCLVKDYFPEPVTVSWNSGALTSGVHTFPAVLQSSGLYSLSSVVTVPSSSLGTQTYICNVNHKPSNTKVDKKVEPKSCDKTHTCPPCPAPELLGGPSVFLFPPKPKDTLMISRTPEVTCVVVDVSHEDPEVKFNWYVDGVEVHNAKTKPREEQYNSTYRVVSVLTVLHQDWLNGKEYKCKVSNKALPAPIEKTISKAKGQPREPQVYTLPPCREEMTKNQVSLWCLVKGFYPSDIAVEWESNGQPENNYKTTPPVLDSDGSFFLYSKLTVDKSRWQQGNVFSCSVMHEALHNHYTQKSLSLSPGK

SEQ ID NO: 76 - protein, 585 aa, synthetic construct
  REGION 1..585: note = GPB03 LC
DVVMTQSPLSLPVTPGEPASISCRSSQSLVHSNRNTYLHWYLQKPGQSPQLLIYKVSNRFSGVPDRFSGSGSGTDFTLKISRVEAEDVGVYYCSQNTHVPPTFGQGTKLEIKRTVAAPSVFIFPPQIVLTQSPAIMSAFPGEKVTMTCSASSSVSYMYWYQQKSGSSPRLLIYDTSNLASGVPVRFSGSGSGTSYSLTISRMEAEDAATYYCQQWSSYPLTFGCGTKLEIKRTVAAPSVFIFPPSDEQLKSGTASVVCLLNNFYPREAKVQWKVDNALQSGNSQESVTEQDSKDSTYSLSSTLTLSKADYEKHKVYACEVTHQGLSSPVTKSFNRGECGGGGSGGGGSGGGGSEPKSSDKTHTCPPCPAPELLGGPSVFLFPPKPKDTLMISRTPEVTCVVVDVSHEDPEVKFNWYVDGVEVHNAKTKPREEQYNSTYRVVSVLTVLHQDWLNGKEYKCKVSNKALPAPIEKTISKAKGQPREPQVYTLPPCREEMTKNQVSLWCLVKGFYPSDIAVEWESNGQPENNYKTTPPVLDSDGSFFLYSKLTVDKSRWQQGNVFSCSVMHEALHNHYTQKSLSLSPGK

SEQ ID NO: 77 - protein, 572 aa, synthetic construct
  REGION 1..572: note = GPB04 HC
EVQLVESGGGLVKPGGSLKLSCAASGFTFSRYAMSWVRQIPEKILEWVAAIDSSGGDTYYLDTVKDRFTISRDNANNTLHLQMRSLRSEDTALYYCVRQGGAYWGQGTLVTVSSASTKGPSVFPLAPQVQLVQSGAEVKKPGASVKVSCKASGYTFTDYEMHWVRQAPGQCLEWMGALDPKTGDTAYSQKFKGRVTLTADKSTSTAYMELSSLTSEDTAVYYCTRFYSYTYWGQGTLVTVSSASTKGPSVFPLAPSSKSTSGGTAALGCLVKDYFPEPVTVSWNSGALTSGVHTFPAVLQSSGLYSLSSVVTVPSSSLGTQTYICNVNHKPSNTKVDKKVEPKSCDKTHTCPPCPAPELLGGPSVFLFPPKPKDTLMISRTPEVTCVVVDVSHEDPEVKFNWYVDGVEVHNAKTKPREEQYNSTYRVVSVLTVLHQDWLNGKEYKCKVSNKALPAPIEKTISKAKGQPREPQVYTLPPCREEMTKNQVSLWCLVKGFYPSDIAVEWESNGQPENNYKTTPPVLDSDGSFFLYSKLTVDKSRWQQGNVFSCSVMHEALHNHYTQKSLSLSPGK

SEQ ID NO: 78 - protein, 591 aa, synthetic construct
  REGION 1..591: note = GPB04 LC
DVVMTQTPLTLSVTIGQPASISCKSSQSLLDSDGKTYLNWLLQRPGQSPKRLIYLVSKLDSGAPDRFTGSGSGTDFTLKISRVEAEDLGIYYCWQGTHFPLTFGAGTKLEIKRTVAAPSVFIFPPDVVMTQSPLSLPVTPGEPASISCRSSQSLVHSNRNTYLHWYLQKPGQSPQLLIYKVSNRFSGVPDRFSGSGSGTDFTLKISRVEAEDVGVYYCSQNTHVPPTFGCGTKLEIKRTVAAPSVFIFPPSDEQLKSGTASVVCLLNNFYPREAKVQWKVDNALQSGNSQESVTEQDSKDSTYSLSSTLTLSKADYEKHKVYACEVTHQGLSSPVTKSFNRGECGGGGSGGGGSGGGGSEPKSSDKTHTCPPCPAPELLGGPSVFLFPPKPKDTLMISRTPEVTCVVVDVSHEDPEVKFNWYVDGVEVHNAKTKPREEQYNSTYRVVSVLTVLHQDWLNGKEYKCKVSNKALPAPIEKTISKAKGQPREPQVYTLPPCREEMTKNQVSLWCLVKGFYPSDIAVEWESNGQPENNYKTTPPVLDSDGSFFLYSKLTVDKSRWQQGNVFSCSVMHEALHNHYTQKSLSLSPGK

SEQ ID NO: 79 - protein, 581 aa, synthetic construct
  REGION 1..581: note = GPB06 HC
EVQLVETGGGLVQPKGSLKLSCAASGFTFNASAMNWVRQAPGKGLEWVARIRSKSNNYAIYYADSVKDRFTISRDDSQSMLYLQMNNLKTEDTAMYYCVRDPGYYGNPWFAYWGQGTLVTVSSASTKGPSVFPLAPQVQLVQSGAEVKKPGASVKVSCKASGYTFTDYEMHWVRQAPGQCLEWMGALDPKTGDTAYSQKFKGRVTLTADKSTSTAYMELSSLTSEDTAVYYCTRFYSYTYWGQGTLVTVSSASTKGPSVFPLAPSSKSTSGGTAALGCLVKDYFPEPVTVSWNSGALTSGVHTFPAVLQSSGLYSLSSVVTVPSSSLGTQTYICNVNHKPSNTKVDKKVEPKSCDKTHTCPPCPAPELLGGPSVFLFPPKPKDTLMISRTPEVTCVVVDVSHEDPEVKFNWYVDGVEVHNAKTKPREEQYNSTYRVVSVLTVLHQDWLNGKEYKCKVSNKALPAPIEKTISKAKGQPREPQVYTLPPCREEMTKNQVSLWCLVKGFYPSDIAVEWESNGQPENNYKTTPPVLDSDGSFFLYSKLTVDKSRWQQGNVFSCSVMHEALHNHYTQKSLSLSPGK

SEQ ID NO: 80 - protein, 585 aa, synthetic construct
  REGION 1..585: note = GPB06 LC
QIVLTQSPAIMSAFPGEKVTMTCSASSSVSYMYWYQQKSGSSPRLLIYDTSNLASGVPVRFSGSGSGTSYSLTISRMEAEDAATYYCQQWSSYPLTFGGGTKLEIKRTVAAPSVFIFPPDVVMTQSPLSLPVTPGEPASISCRSSQSLVHSNRNTYLHWYLQKPGQSPQLLIYKVSNRFSGVPDRFSGSGSGTDFTLKISRVEAEDVGVYYCSQNTHVPPTFGCGTKLEIKRTVAAPSVFIFPPSDEQLKSGTASVVCLLNNFYPREAKVQWKVDNALQSGNSQESVTEQDSKDSTYSLSSTLTLSKADYEKHKVYACEVTHQGLSSPVTKSFNRGECGGGGSGGGGSGGGGSEPKSSDKTHTCPPCPAPELLGGPSVFLFPPKPKDTLMISRTPEVTCVVVDVSHEDPEVKFNWYVDGVEVHNAKTKPREEQYNSTYRVVSVLTVLHQDWLNGKEYKCKVSNKALPAPIEKTISKAKGQPREPQVYTLPPCREEMTKNQVSLWCLVKGFYPSDIAVEWESNGQPENNYKTTPPVLDSDGSFFLYSKLTVDKSRWQQGNVFSCSVMHEALHNHYTQKSLSLSPGK

SEQ ID NO: 81 - protein, 114 aa, synthetic construct
  REGION 1..114: note = VH of GPM01
EVQLVESGGGLVKPGGSLKLSCAASGFTFSRYAMSWVRQIPEKCLEWVAAIDSSGGDTYYLDTVKDRFTISRDNANNTLHLQMRSLRSEDTALYYCVRQGGAYWGQGTLVTVSS

SEQ ID NO: 82 - protein, 112 aa, synthetic construct
  REGION 1..112: note = VL of GPM01
DVVMTQTPLTLSVTIGQPASISCKSSQSLLDSDGKTYLNWLLQRPGQSPKRLIYLVSKLDSGAPDRFTGSGSGTDFTLKISRVEAEDLGIYYCWQGTHFPLTFGCGTKLEIK

SEQ ID NO: 83 - protein, 115 aa, synthetic construct
  REGION 1..115: note = VH of GPM02
QVQLVQSGAEVKKPGASVKVSCKASGYTFTDYEMHWVRQAPGQCLEWMGALDPKTGDTAYSQKFKGRVTLTADKSTSTAYMELSSLTSEDTAVYYCTRFYSYTYWGQGTLVTVSS

SEQ ID NO: 84 - protein, 112 aa, synthetic construct
  REGION 1..112: note = VL of GPM02
DVVMTQSPLSLPVTPGEPASISCRSSQSLVHSNRNTYLHWYLQKPGQSPQLLIYKVSNRFSGVPDRFSGSGSGTDFTLKISRVEAEDVGVYYCSQNTHVPPTFGCGTKLEIK

SEQ ID NO: 85 - protein, 123 aa, synthetic construct
  REGION 1..123: note = VH of GPM04
EVQLVETGGGLVQPKGSLKLSCAASGFTFNASAMNWVRQAPGKCLEWVARIRSKSNNYAIYYADSVKDRFTISRDDSQSMLYLQMNNLKTEDTAMYYCVRDPGYYGNPWFAYWGQGTLVTVSS

SEQ ID NO: 86 - protein, 106 aa, synthetic construct
  REGION 1..106: note = VL of GPM04
QIVLTQSPAIMSAFPGEKVTMTCSASSSVSYMYWYQQKSGSSPRLLIYDTSNLASGVPVRFSGSGSGTSYSLTISRMEAEDAATYYCQQWSSYPLTFGCGTKLEIK

SEQ ID NO: 87 - protein, 115 aa, synthetic construct
  REGION 1..115: note = VH1 of GPB01
QVQLVQSGAEVKKPGASVKVSCKASGYTFTDYEMHWVRQAPGQGLEWMGALDPKTGDTAYSQKFKGRVTLTADKSTSTAYMELSSLTSEDTAVYYCTRFYSYTYWGQGTLVTVSS

SEQ ID NO: 88 - protein, 112 aa, synthetic construct
  REGION 1..112: note = VL1 of GPB01
DVVMTQSPLSLPVTPGEPASISCRSSQSLVHSNRNTYLHWYLQKPGQSPQLLIYKVSNRFSGVPDRFSGSGSGTDFTLKISRVEAEDVGVYYCSQNTHVPPTFGQGTKLEIK

SEQ ID NO: 89 - protein, 114 aa, synthetic construct
  REGION 1..114: note = VH1 of GPB04
EVQLVESGGGLVKPGGSLKLSCAASGFTFSRYAMSWVRQIPEKILEWVAAIDSSGGDTYYLDTVKDRFTISRDNANNTLHLQMRSLRSEDTALYYCVRQGGAYWGQGTLVTVSS

SEQ ID NO: 90 - protein, 112 aa, synthetic construct
  REGION 1..112: note = VL1 of GPB04
DVVMTQTPLTLSVTIGQPASISCKSSQSLLDSDGKTYLNWLLQRPGQSPKRLIYLVSKLDSGAPDRFTGSGSGTDFTLKISRVEAEDLGIYYCWQGTHFPLTFGAGTKLEIK

SEQ ID NO: 91 - protein, 123 aa, synthetic construct
  REGION 1..123: note = VH1 of GPB06
EVQLVETGGGLVQPKGSLKLSCAASGFTFNASAMNWVRQAPGKGLEWVARIRSKSNNYAIYYADSVKDRFTISRDDSQSMLYLQMNNLKTEDTAMYYCVRDPGYYGNPWFAYWGQGTLVTVSS

SEQ ID NO: 92 - protein, 106 aa, synthetic construct
  REGION 1..106: note = VL1 of GPB06
QIVLTQSPAIMSAFPGEKVTMTCSASSSVSYMYWYQQKSGSSPRLLIYDTSNLASGVPVRFSGSGSGTSYSLTISRMEAEDAATYYCQQWSSYPLTFGGGTKLEIK

SEQ ID NO: 93 - protein, 5 aa, synthetic construct
  REGION 1..5: note = CDR-H1 of GPM01
RYAMS

SEQ ID NO: 94 - protein, 17 aa, synthetic construct
  REGION 1..17: note = CDR-H2 of GPM01
AIDSSGGDTYYLDTVKD

SEQ ID NO: 95 - protein, 5 aa, synthetic construct
  REGION 1..5: note = CDR-H3 of GPM01
QGGAY

SEQ ID NO: 96 - protein, 16 aa, synthetic construct
  REGION 1..16: note = CDR-L1 of GPM01
KSSQSLLDSDGKTYLN

SEQ ID NO: 97 - protein, 7 aa, synthetic construct
  REGION 1..7: note = CDR-L2 of GPM01
LVSKLDS

SEQ ID NO: 98 - protein, 9 aa, synthetic construct
  REGION 1..9: note = CDR-L3 of GPM01
WQGTHFPLT

SEQ ID NO: 99 - protein, 5 aa, synthetic construct
  REGION 1..5: note = CDR-H1 of GPM02
DYEMH

SEQ ID NO: 100 - protein, 17 aa, synthetic construct
  REGION 1..17: note = CDR-H2 of GPM02
ALDPKTGDTAYSQKFKG

SEQ ID NO: 101 - protein, 6 aa, synthetic construct
  REGION 1..6: note = CDR-H3 of GPM02
FYSYTY

SEQ ID NO: 102 - protein, 16 aa, synthetic construct
  REGION 1..16: note = CDR-L1 of GPM02
RSSQSLVHSNRNTYLH

SEQ ID NO: 103 - protein, 7 aa, synthetic construct
  REGION 1..7: note = CDR-L2 of GPM02
KVSNRFS

SEQ ID NO: 104 - protein, 9 aa, synthetic construct
  REGION 1..9: note = CDR-L3 of GPM02
SQNTHVPPT

SEQ ID NO: 105 - protein, 5 aa, synthetic construct
  REGION 1..5: note = CDR-H1 of GPM04
ASAMN

SEQ ID NO: 106 - protein, 19 aa, synthetic construct
  REGION 1..19: note = CDR-H2 of GPM04
RIRSKSNNYAIYYADSVKD

SEQ ID NO: 107 - protein, 12 aa, synthetic construct
  REGION 1..12: note = CDR-H3 of GPM04
DPGYYGNPWFAY

SEQ ID NO: 108 - protein, 10 aa, synthetic construct
  REGION 1..10: note = CDR-L1 of GPM04
SASSSVSYMY

SEQ ID NO: 109 - protein, 7 aa, synthetic construct
  REGION 1..7: note = CDR-L2 of GPM04
DTSNLAS

SEQ ID NO: 110 - protein, 9 aa, synthetic construct
  REGION 1..9: note = CDR-L3 of GPM04
QQWSSYPLT

SEQ ID NO: 111 - protein, 600 aa, synthetic construct
  REGION 1..600: note = EPB01 HC
EVQLLESGGGLVQPGGSLRLSCAASGFTFSRYQMMWVRQAPGKGLEWVSSISPSGGVTLYADSVKGRFTISRDNSKNTLYLQMNSLRAEDTAVYYCTRELLGTVVVPVAWKMRGYFDYWGQLTLVTVSSASTKGPSVFPLAPEVQLLESGGGLVQPGGSLRLSCAASGFTFSHYMMAWVRQAPGKCLEWVSRIGPSGGPTHYADSVKGRFTISRDNSKNTLYLQMNSLRAEDTAVYYCAGYDSGYDYVAVAGPAEYFQHWGQGTLVTVSSASTKGPSVFPLAPSSKSTSGGTAALGCLVKDYFPEPVTVSWNSGALTSGVHTFPAVLQSSGLYSLSSVVTVPSSSLGTQTYICNVNHKPSNTKVDKKVEPKSCDKTHTCPPCPAPELLGGPSVFLFPPKPKDTLMISRTPEVTCVVVDVSHEDPEVKFNWYVDGVEVHNAKTKPREEQYNSTYRVVSVLTVLHQDWLNGKEYKCKVSNKALPAPIEKTISKAKGQPREPQVYTLPPCREEMTKNQVSLWCLVKGFYPSDIAVEWESNGQPENNYKTTPPVLDSDGSFFLYSKLTVDKSRWQQGNVFSCSVMHEALHNHYTQKSLSLSPGK

SEQ ID NO: 112 - protein, 582 aa, synthetic construct
  REGION 1..582: note = EPB01 LC
DIQMTQSPGTLSVSPGERATLSCRASQSVSSNLAWYQQKPGQAPRLLIYGASTRATGIPARFSGSGSGTEFTLTISSMQSEDFAVYYCQQYNNWPPLTFGGGTKVEIKRTVAAPSVFIFPPDIQMTQSPSSLSASVGDRVTITCRASQSISTWLAWYQQKPGKAPKLLIYKASNLHTGVPSRFSGSGSGTEFSLTISGLQPDDFATYYCQQYNSYSRTFGCGTKVEIKRTVAAPSVFIFPPSDEQLKSGTASVVCLLNNFYPREAKVQWKVDNALQSGNSQESVTEQDSKDSTYSLSSTLTLSKADYEKHKVYACEVTHQGLSSPVTKSFNRGECGGGGSGGGGSGGGGSEPKSSDKTHTCPPCPAPELLGGPSVFLFPPKPKDTLMISRTPEVTCVVVDVSHEDPEVKFNWYVDGVEVHNAKTKPREEQYNSTYRVVSVLTVLHQDWLNGKEYKCKVSNKALPAPIEKTISKAKGQPREPQVYTLPPCREEMTKNQVSLWCLVKGFYPSDIAVEWESNGQPENNYKTTPPVLDSDGSFFLYSKLTVDKSRWQQGNVFSCSVMHEALHNHYTQKSLSLSPGK

SEQ ID NO: 113 - protein, 591 aa, synthetic construct
  REGION 1..591: note = EPB02 HC
EVQLVESGGGVVRPGGSLRLSCAASGFTVSDYSMNWVRQAPGKGLEWIGFIRNKANAYTTEYSASVKGRFTISRDDSKNTLYLQMNSLKTEDTAVYYCTTYPRYHAMDSWGQGTMVTVSSASTKGPSVFPLAPEVQLLESGGGLVQPGGSLRLSCAASGFTFSHYMMAWVRQAPGKCLEWVSRIGPSGGPTHYADSVKGRFTISRDNSKNTLYLQMNSLRAEDTAVYYCAGYDSGYDYVAVAGPAEYFQHWGQGTLVTVSSASTKGPSVFPLAPSSKSTSGGTAALGCLVKDYFPEPVTVSWNSGALTSGVHTFPAVLQSSGLYSLSSVVTVPSSSLGTQTYICNVNHKPSNTKVDKKVEPKSCDKTHTCPPCPAPELLGGPSVFLFPPKPKDTLMISRTPEVTCVVVDVSHEDPEVKFNWYVDGVEVHNAKTKPREEQYNSTYRVVSVLTVLHQDWLNGKEYKCKVSNKALPAPIEKTISKAKGQPREPQVYTLPPCREEMTKNQVSLWCLVKGFYPSDIAVEWESNGQPENNYKTTPPVLDSDGSFFLYSKLTVDKSRWQQGNVFSCSVMHEALHNHYTQKSLSLSPGK

SEQ ID NO: 114 - protein, 581 aa, synthetic construct
  REGION 1..581: note = EPB02 LC
AIQLTQSPSSLSASVGDRVTITCRASQSISNNLHWYLQKPGQSPQLLIYYGFQSISGVPSRFSGSGSGTDFTLTISSLQPEDFATYYCQQANSWPLTFGGGTKLEIKRTVAAPSVFIFPPDIQMTQSPSSLSASVGDRVTITCRASQSISTWLAWYQQKPGKAPKLLIYKASNLHTGVPSRFSGSGSGTEFSLTISGLQPDDFATYYCQQYNSYSRTFGCGTKVEIKRTVAAPSVFIFPPSDEQLKSGTASVVCLLNNFYPREAKVQWKVDNALQSGNSQESVTEQDSKDSTYSLSSTLTLSKADYEKHKVYACEVTHQGLSSPVTKSFNRGECGGGGSGGGGSGGGGSEPKSSDKTHTCPPCPAPELLGGPSVFLFPPKPKDTLMISRTPEVTCVVVDVSHEDPEVKFNWYVDGVEVHNAKTKPREEQYNSTYRVVSVLTVLHQDWLNGKEYKCKVSNKALPAPIEKTISKAKGQPREPQVYTLPPCREEMTKNQVSLWCLVKGFYPSDIAVEWESNGQPENNYKTTPPVLDSDGSFFLYSKLTVDKSRWQQGNVFSCSVMHEALHNHYTQKSLSLSPGK

SEQ ID NO: 115 - protein, 586 aa, synthetic construct
  REGION 1..586: note = EPB03 HC
QVQLLESGGGLVQPGGSLRLSCAASGFTFSSYTMSWVRQAPGQALEWMGTISSGGTYTYYPDSVKGRFTISRDNAKNSLYLQMNSLRAEDTAVYYCAREAIFTYWGRGTLVTVSSASTKGPSVFPLAPEVQLLESGGGLVQPGGSLRLSCAASGFTFSHYMMAWVRQAPGKCLEWVSRIGPSGGPTHYADSVKGRFTISRDNSKNTLYLQMNSLRAEDTAVYYCAGYDSGYDYVAVAGPAEYFQHWGQGTLVTVSSASTKGPSVFPLAPSSKSTSGGTAALGCLVKDYFPEPVTVSWNSGALTSGVHTFPAVLQSSGLYSLSSVVTVPSSSLGTQTYICNVNHKPSNTKVDKKVEPKSCDKTHTCPPCPAPELLGGPSVFLFPPKPKDTLMISRTPEVTCVVVDVSHEDPEVKFNWYVDGVEVHNAKTKPREEQYNSTYRVVSVLTVLHQDWLNGKEYKCKVSNKALPAPIEKTISKAKGQPREPQVYTLPPCREEMTKNQVSLWCLVKGFYPSDIAVEWESNGQPENNYKTTPPVLDSDGSFFLYSKLTVDKSRWQQGNVFSCSVMHEALHNHYTQKSLSLSPGK

SEQ ID NO: 116 - protein, 581 aa, synthetic construct
  REGION 1..581: note = EPB03 LC
DIQLTQSPSSLSLSPGERVTLSCKASQDINNYLSWYQQKPDQAPKLLIKRANRLVDGVPDRFSGSGSGTDFTLKISRVEAEDVGVYYCLKYDEFPYTFGQGTRLEIKRTVAAPSVFIFPPDIQMTQSPSSLSASVGDRVTITCRASQSISTWLAWYQQKPGKAPKLLIYKASNLHTGVPSRFSGSGSGTEFSLTISGLQPDDFATYYCQQYNSYSRTFGCGTKVEIKRTVAAPSVFIFPPSDEQLKSGTASVVCLLNNFYPREAKVQWKVDNALQSGNSQESVTEQDSKDSTYSLSSTLTLSKADYEKHKVYACEVTHQGLSSPVTKSFNRGECGGGGSGGGGSGGGGSEPKSSDKTHTCPPCPAPELLGGPSVFLFPPKPKDTLMISRTPEVTCVVVDVSHEDPEVKFNWYVDGVEVHNAKTKPREEQYNSTYRVVSVLTVLHQDWLNGKEYKCKVSNKALPAPIEKTISKAKGQPREPQVYTLPPCREEMTKNQVSLWCLVKGFYPSDIAVEWESNGQPENNYKTTPPVLDSDGSFFLYSKLTVDKSRWQQGNVFSCSVMHEALHNHYTQKSLSLSPGK

SEQ ID NO: 117 - protein, 600 aa, synthetic construct
  REGION 1..600: note = EPB04 HC
EVQLLESGGGLVQPGGSLRLSCAASGFTFSHYMMAWVRQAPGKGLEWVSRIGPSGGPTHYADSVKGRFTISRDNSKNTLYLQMNSLRAEDTAVYYCAGYDSGYDYVAVAGPAEYFQHWGQGTLVTVSSASTKGPSVFPLAPEVQLLESGGGLVQPGGSLRLSCAASGFTFSRYQMMWVRQAPGKCLEWVSSISPSGGVTLYADSVKGRFTISRDNSKNTLYLQMNSLRAEDTAVYYCTRELLGTVVVPVAWKMRGYFDYWGQLTLVTVSSASTKGPSVFPLAPSSKSTSGGTAALGCLVKDYFPEPVTVSWNSGALTSGVHTFPAVLQSSGLYSLSSVVTVPSSSLGTQTYICNVNHKPSNTKVDKKVEPKSCDKTHTCPPCPAPELLGGPSVFLFPPKPKDTLMISRTPEVTCVVVDVSHEDPEVKFNWYVDGVEVHNAKTKPREEQYNSTYRVVSVLTVLHQDWLNGKEYKCKVSNKALPAPIEKTISKAKGQPREPQVYTLPPCREEMTKNQVSLWCLVKGFYPSDIAVEWESNGQPENNYKTTPPVLDSDGSFFLYSKLTVDKSRWQQGNVFSCSVMHEALHNHYTQKSLSLSPGK

SEQ ID NO: 118 - protein, 582 aa, synthetic construct
  REGION 1..582: note = EPB04 LC
DIQMTQSPSSLSASVGDRVTITCRASQSISTWLAWYQQKPGKAPKLLIYKASNLHTGVPSRFSGSGSGTEFSLTISGLQPDDFATYYCQQYNSYSRTFGQGTKVEIKRTVAAPSVFIFPPDIQMTQSPGTLSVSPGERATLSCRASQSVSSNLAWYQQKPGQAPRLLIYGASTRATGIPARFSGSGSGTEFTLTISSMQSEDFAVYYCQQYNNWPPLTFGCGTKVEIKRTVAAPSVFIFPPSDEQLKSGTASVVCLLNNFYPREAKVQWKVDNALQSGNSQESVTEQDSKDSTYSLSSTLTLSKADYEKHKVYACEVTHQGLSSPVTKSFNRGECGGGGSGGGGSGGGGSEPKSSDKTHTCPPCPAPELLGGPSVFLFPPKPKDTLMISRTPEVTCVVVDVSHEDPEVKFNWYVDGVEVHNAKTKPREEQYNSTYRVVSVLTVLHQDWLNGKEYKCKVSNKALPAPIEKTISKAKGQPREPQVYTLPPCREEMTKNQVSLWCLVKGFYPSDIAVEWESNGQPENNYKTTPPVLDSDGSFFLYSKLTVDKSRWQQGNVFSCSVMHEALHNHYTQKSLSLSPGK

SEQ ID NO: 119 - protein, 591 aa, synthetic construct
  REGION 1..591: note = EPB05 HC
EVQLLESGGGLVQPGGSLRLSCAASGFTFSHYMMAWVRQAPGKGLEWVSRIGPSGGPTHYADSVKGRFTISRDNSKNTLYLQMNSLRAEDTAVYYCAGYDSGYDYVAVAGPAEYFQHWGQGTLVTVSSASTKGPSVFPLAPEVQLVESGGGVVRPGGSLRLSCAASGFTVSDYSMNWVRQAPGKCLEWIGFIRNKANAYTTEYSASVKGRFTISRDDSKNTLYLQMNSLKTEDTAVYYCTTYPRYHAMDSWGQGTMVTVSSASTKGPSVFPLAPSSKSTSGGTAALGCLVKDYFPEPVTVSWNSGALTSGVHTFPAVLQSSGLYSLSSVVTVPSSSLGTQTYICNVNHKPSNTKVDKKVEPKSCDKTHTCPPCPAPELLGGPSVFLFPPKPKDTLMISRTPEVTCVVVDVSHEDPEVKFNWYVDGVEVHNAKTKPREEQYNSTYRVVSVLTVLHQDWLNGKEYKCKVSNKALPAPIEKTISKAKGQPREPQVYTLPPCREEMTKNQVSLWCLVKGFYPSDIAVEWESNGQPENNYKTTPPVLDSDGSFFLYSKLTVDKSRWQQGNVFSCSVMHEALHNHYTQKSLSLSPGK

SEQ ID NO: 120 - protein, 581 aa, synthetic construct
  REGION 1..581: note = EPB05 LC
DIQMTQSPSSLSASVGDRVTITCRASQSISTWLAWYQQKPGKAPKLLIYKASNLHTGVPSRFSGSGSGTEFSLTISGLQPDDFATYYCQQYNSYSRTFGQGTKVEIKRTVAAPSVFIFPPAIQLTQSPSSLSASVGDRVTITCRASQSISNNLHWYLQKPGQSPQLLIYYGFQSISGVPSRFSGSGSGTDFTLTISSLQPEDFATYYCQQANSWPLTFGCGTKLEIKRTVAAPSVFIFPPSDEQLKSGTASVVCLLNNFYPREAKVQWKVDNALQSGNSQESVTEQDSKDSTYSLSSTLTLSKADYEKHKVYACEVTHQGLSSPVTKSFNRGECGGGGSGGGGSGGGGSEPKSSDKTHTCPPCPAPELLGGPSVFLFPPKPKDTLMISRTPEVTCVVVDVSHEDPEVKFNWYVDGVEVHNAKTKPREEQYNSTYRVVSVLTVLHQDWLNGKEYKCKVSNKALPAPIEKTISKAKGQPREPQVYTLPPCREEMTKNQVSLWCLVKGFYPSDIAVEWESNGQPENNYKTTPPVLDSDGSFFLYSKLTVDKSRWQQGNVFSCSVMHEALHNHYTQKSLSLSPGK

SEQ ID NO: 121 - protein, 586 aa, synthetic construct
  REGION 1..586: note = EPB06 HC
EVQLLESGGGLVQPGGSLRLSCAASGFTFSHYMMAWVRQAPGKGLEWVSRIGPSGGPTHYADSVKGRFTISRDNSKNTLYLQMNSLRAEDTAVYYCAGYDSGYDYVAVAGPAEYFQHWGQGTLVTVSSASTKGPSVFPLAPQVQLLESGGGLVQPGGSLRLSCAASGFTFSSYTMSWVRQAPGQCLEWMGTISSGGTYTYYPDSVKGRFTISRDNAKNSLYLQMNSLRAEDTAVYYCAREAIFTYWGRGTLVTVSSASTKGPSVFPLAPSSKSTSGGTAALGCLVKDYFPEPVTVSWNSGALTSGVHTFPAVLQSSGLYSLSSVVTVPSSSLGTQTYICNVNHKPSNTKVDKKVEPKSCDKTHTCPPCPAPELLGGPSVFLFPPKPKDTLMISRTPEVTCVVVDVSHEDPEVKFNWYVDGVEVHNAKTKPREEQYNSTYRVVSVLTVLHQDWLNGKEYKCKVSNKALPAPIEKTISKAKGQPREPQVYTLPPCREEMTKNQVSLWCLVKGFYPSDIAVEWESNGQPENNYKTTPPVLDSDGSFFLYSKLTVDKSRWQQGNVFSCSVMHEALHNHYTQKSLSLSPGK

SEQ ID NO: 122 - protein, 581 aa, synthetic construct
  REGION 1..581: note = EPB06 LC
DIQMTQSPSSLSASVGDRVTITCRASQSISTWLAWYQQKPGKAPKLLIYKASNLHTGVPSRFSGSGSGTEFSLTISGLQPDDFATYYCQQYNSYSRTFGQGTKVEIKRTVAAPSVFIFPPDIQLTQSPSSLSLSPGERVTLSCKASQDINNYLSWYQQKPDQAPKLLIKRANRLVDGVPDRFSGSGSGTDFTLKISRVEAEDVGVYYCLKYDEFPYTFGCGTRLEIKRTVAAPSVFIFPPSDEQLKSGTASVVCLLNNFYPREAKVQWKVDNALQSGNSQESVTEQDSKDSTYSLSSTLTLSKADYEKHKVYACEVTHQGLSSPVTKSFNRGECGGGGSGGGGSGGGGSEPKSSDKTHTCPPCPAPELLGGPSVFLFPPKPKDTLMISRTPEVTCVVVDVSHEDPEVKFNWYVDGVEVHNAKTKPREEQYNSTYRVVSVLTVLHQDWLNGKEYKCKVSNKALPAPIEKTISKAKGQPREPQVYTLPPCREEMTKNQVSLWCLVKGFYPSDIAVEWESNGQPENNYKTTPPVLDSDGSFFLYSKLTVDKSRWQQGNVFSCSVMHEALHNHYTQKSLSLSPGK

SEQ ID NO: 123 - protein, 592 aa, synthetic construct
  REGION 1..592: note = EPB07 HC
EVQLVESGGGVVRPGGSLRLSCAASGFTVSDYSMNWVRQAPGKGLEWIGFIRNKANAYTTEYSASVKGRFTISRDDSKNTLYLQMNSLKTEDTAVYYCTTYPRYHAMDSWGQGTMVTVSSASTKGPSVFPLAPEVQLLESGGGLVQPGGSLRLSCAASGFTFSRYQMMWVRQAPGKCLEWVSSISPSGGVTLYADSVKGRFTISRDNSKNTLYLQMNSLRAEDTAVYYCTRELLGTVVVPVAWKMRGYFDYWGQLTLVTVSSASTKGPSVFPLAPSSKSTSGGTAALGCLVKDYFPEPVTVSWNSGALTSGVHTFPAVLQSSGLYSLSSVVTVPSSSLGTQTYICNVNHKPSNTKVDKKVEPKSCDKTHTCPPCPAPELLGGPSVFLFPPKPKDTLMISRTPEVTCVVVDVSHEDPEVKFNWYVDGVEVHNAKTKPREEQYNSTYRVVSVLTVLHQDWLNGKEYKCKVSNKALPAPIEKTISKAKGQPREPQVYTLPPCREEMTKNQVSLWCLVKGFYPSDIAVEWESNGQPENNYKTTPPVLDSDGSFFLYSKLTVDKSRWQQGNVFSCSVMHEALHNHYTQKSLSLSPGK

SEQ ID NO: 124 - protein, 582 aa, synthetic construct
  REGION 1..582: note = EPB07 LC
AIQLTQSPSSLSASVGDRVTITCRASQSISNNLHWYLQKPGQSPQLLIYYGFQSISGVPSRFSGSGSGTDFTLTISSLQPEDFATYYCQQANSWPLTFGGGTKLEIKRTVAAPSVFIFPPDIQMTQSPGTLSVSPGERATLSCRASQSVSSNLAWYQQKPGQAPRLLIYGASTRATGIPARFSGSGSGTEFTLTISSMQSEDFAVYYCQQYNNWPPLTFGCGTKVEIKRTVAAPSVFIFPPSDEQLKSGTASVVCLLNNFYPREAKVQWKVDNALQSGNSQESVTEQDSKDSTYSLSSTLTLSKADYEKHKVYACEVTHQGLSSPVTKSFNRGECGGGGSGGGGSGGGGSEPKSSDKTHTCPPCPAPELLGGPSVFLFPPKPKDTLMISRTPEVTCVVVDVSHEDPEVKFNWYVDGVEVHNAKTKPREEQYNSTYRVVSVLTVLHQDWLNGKEYKCKVSNKALPAPIEKTISKAKGQPREPQVYTLPPCREEMTKNQVSLWCLVKGFYPSDIAVEWESNGQPENNYKTTPPVLDSDGSFFLYSKLTVDKSRWQQGNVFSCSVMHEALHNHYTQKSLSLSPGK

SEQ ID NO: 125 - protein, 587 aa, synthetic construct
  REGION 1..587: note = EPB08 HC
QVQLLESGGGLVQPGGSLRLSCAASGFTFSSYTMSWVRQAPGQALEWMGTISSGGTYTYYPDSVKGRFTISRDNAKNSLYLQMNSLRAEDTAVYYCAREAIFTYWGRGTLVTVSSASTKGPSVFPLAPEVQLLESGGGLVQPGGSLRLSCAASGFTFSRYQMMWVRQAPGKCLEWVSSISPSGGVTLYADSVKGRFTISRDNSKNTLYLQMNSLRAEDTAVYYCTRELLGTVVVPVAWKMRGYFDYWGQLTLVTVSSASTKGPSVFPLAPSSKSTSGGTAALGCLVKDYFPEPVTVSWNSGALTSGVHTFPAVLQSSGLYSLSSVVTVPSSSLGTQTYICNVNHKPSNTKVDKKVEPKSCDKTHTCPPCPAPELLGGPSVFLFPPKPKDTLMISRTPEVTCVVVDVSHEDPEVKFNWYVDGVEVHNAKTKPREEQYNSTYRVVSVLTVLHQDWLNGKEYKCKVSNKALPAPIEKTISKAKGQPREPQVYTLPPCREEMTKNQVSLWCLVKGFYPSDIAVEWESNGQPENNYKTTPPVLDSDGSFFLYSKLTVDKSRWQQGNVFSCSVMHEALHNHYTQKSLSLSPGK

SEQ ID NO: 126 - protein, 582 aa, synthetic construct
  REGION 1..582: note = EPB08 LC
DIQLTQSPSSLSLSPGERVTLSCKASQDINNYLSWYQQKPDQAPKLLIKRANRLVDGVPDRFSGSGSGTDFTLKISRVEAEDVGVYYCLKYDEFPYTFGQGTRLEIKRTVAAPSVFIFPPDIQMTQSPGTLSVSPGERATLSCRASQSVSSNLAWYQQKPGQAPRLLIYGASTRATGIPARFSGSGSGTEFTLTISSMQSEDFAVYYCQQYNNWPPLTFGCGTKVEIKRTVAAPSVFIFPPSDEQLKSGTASVVCLLNNFYPREAKVQWKVDNALQSGNSQESVTEQDSKDSTYSLSSTLTLSKADYEKHKVYACEVTHQGLSSPVTKSFNRGECGGGGSGGGGSGGGGSEPKSSDKTHTCPPCPAPELLGGPSVFLFPPKPKDTLMISRTPEVTCVVVDVSHEDPEVKFNWYVDGVEVHNAKTKPREEQYNSTYRVVSVLTVLHQDWLNGKEYKCKVSNKALPAPIEKTISKAKGQPREPQVYTLPPCREEMTKNQVSLWCLVKGFYPSDIAVEWESNGQPENNYKTTPPVLDSDGSFFLYSKLTVDKSRWQQGNVFSCSVMHEALHNHYTQKSLSLSPGK

SEQ ID NO: 127 - protein, 592 aa, synthetic construct
  REGION 1..592: note = EPB09 HC
EVQLLESGGGLVQPGGSLRLSCAASGFTFSRYQMMWVRQAPGKGLEWVSSISPSGGVTLYADSVKGRFTISRDNSKNTLYLQMNSLRAEDTAVYYCTRELLGTVVVPVAWKMRGYFDYWGQLTLVTVSSASTKGPSVFPLAPEVQLVESGGGVVRPGGSLRLSCAASGFTVSDYSMNWVRQAPGKCLEWIGFIRNKANAYTTEYSASVKGRFTISRDDSKNTLYLQMNSLKTEDTAVYYCTTYPRYHAMDSWGQGTMVTVSSASTKGPSVFPLAPSSKSTSGGTAALGCLVKDYFPEPVTVSWNSGALTSGVHTFPAVLQSSGLYSLSSVVTVPSSSLGTQTYICNVNHKPSNTKVDKKVEPKSCDKTHTCPPCPAPELLGGPSVFLFPPKPKDTLMISRTPEVTCVVVDVSHEDPEVKFNWYVDGVEVHNAKTKPREEQYNSTYRVVSVLTVLHQDWLNGKEYKCKVSNKALPAPIEKTISKAKGQPREPQVYTLPPCREEMTKNQVSLWCLVKGFYPSDIAVEWESNGQPENNYKTTPPVLDSDGSFFLYSKLTVDKSRWQQGNVFSCSVMHEALHNHYTQKSLSLSPGK

SEQ ID NO: 128 - protein, 582 aa, synthetic construct
  REGION 1..582: note = EPB09 LC
DIQMTQSPGTLSVSPGERATLSCRASQSVSSNLAWYQQKPGQAPRLLIYGASTRATGIPARFSGSGSGTEFTLTISSMQSEDFAVYYCQQYNNWPPLTFGGGTKVEIKRTVAAPSVFIFPPAIQLTQSPSSLSASVGDRVTITCRASQSISNNLHWYLQKPGQSPQLLIYYGFQSISGVPSRFSGSGSGTDFTLTISSLQPEDFATYYCQQANSWPLTFGCGTKLEIKRTVAAPSVFIFPPSDEQLKSGTASVVCLLNNFYPREAKVQWKVDNALQSGNSQESVTEQDSKDSTYSLSSTLTLSKADYEKHKVYACEVTHQGLSSPVTKSFNRGECGGGGSGGGGSGGGGSEPKSSDKTHTCPPCPAPELLGGPSVFLFPPKPKDTLMISRTPEVTCVVVDVSHEDPEVKFNWYVDGVEVHNAKTKPREEQYNSTYRVVSVLTVLHQDWLNGKEYKCKVSNKALPAPIEKTISKAKGQPREPQVYTLPPCREEMTKNQVSLWCLVKGFYPSDIAVEWESNGQPENNYKTTPPVLDSDGSFFLYSKLTVDKSRWQQGNVFSCSVMHEALHNHYTQKSLSLSPGK

SEQ ID NO: 129 - protein, 578 aa, synthetic construct
  REGION 1..578: note = EPB10 HC
QVQLLESGGGLVQPGGSLRLSCAASGFTFSSYTMSWVRQAPGQALEWMGTISSGGTYTYYPDSVKGRFTISRDNAKNSLYLQMNSLRAEDTAVYYCAREAIFTYWGRGTLVTVSSASTKGPSVFPLAPEVQLVESGGGVVRPGGSLRLSCAASGFTVSDYSMNWVRQAPGKCLEWIGFIRNKANAYTTEYSASVKGRFTISRDDSKNTLYLQMNSLKTEDTAVYYCTTYPRYHAMDSWGQGTMVTVSSASTKGPSVFPLAPSSKSTSGGTAALGCLVKDYFPEPVTVSWNSGALTSGVHTFPAVLQSSGLYSLSSVVTVPSSSLGTQTYICNVNHKPSNTKVDKKVEPKSCDKTHTCPPCPAPELLGGPSVFLFPPKPKDTLMISRTPEVTCVVVDVSHEDPEVKFNWYVDGVEVHNAKTKPREEQYNSTYRVVSVLTVLHQDWLNGKEYKCKVSNKALPAPIEKTISKAKGQPREPQVYTLPPCREEMTKNQVSLWCLVKGFYPSDIAVEWESNGQPENNYKTTPPVLDSDGSFFLYSKLTVDKSRWQQGNVFSCSVMHEALHNHYTQKSLSLSPGK

SEQ ID NO: 130 - protein, 581 aa, synthetic construct
  REGION 1..581: note = EPB10 LC
DIQLTQSPSSLSLSPGERVTLSCKASQDINNYLSWYQQKPDQAPKLLIKRANRLVDGVPDRFSGSGSGTDFTLKISRVEAEDVGVYYCLKYDEFPYTFGQGTRLEIKRTVAAPSVFIFPPAIQLTQSPSSLSASVGDRVTITCRASQSISNNLHWYLQKPGQSPQLLIYYGFQSISGVPSRFSGSGSGTDFTLTISSLQPEDFATYYCQQANSWPLTFGCGTKLEIKRTVAAPSVFIFPPSDEQLKSGTASVVCLLNNFYPREAKVQWKVDNALQSGNSQESVTEQDSKDSTYSLSSTLTLSKADYEKHKVYACEVTHQGLSSPVTKSFNRGECGGGGSGGGGSGGGGSEPKSSDKTHTCPPCPAPELLGGPSVFLFPPKPKDTLMISRTPEVTCVVVDVSHEDPEVKFNWYVDGVEVHNAKTKPREEQYNSTYRVVSVLTVLHQDWLNGKEYKCKVSNKALPAPIEKTISKAKGQPREPQVYTLPPCREEMTKNQVSLWCLVKGFYPSDIAVEWESNGQPENNYKTTPPVLDSDGSFFLYSKLTVDKSRWQQGNVFSCSVMHEALHNHYTQKSLSLSPGK

SEQ ID NO: 131 - protein, 587 aa, synthetic construct
  REGION 1..587: note = EPB11 HC
EVQLLESGGGLVQPGGSLRLSCAASGFTFSRYQMMWVRQAPGKGLEWVSSISPSGGVTLYADSVKGRFTISRDNSKNTLYLQMNSLRAEDTAVYYCTRELLGTVVVPVAWKMRGYFDYWGQLTLVTVSSASTKGPSVFPLAPQVQLLESGGGLVQPGGSLRLSCAASGFTFSSYTMSWVRQAPGQCLEWMGTISSGGTYTYYPDSVKGRFTISRDNAKNSLYLQMNSLRAEDTAVYYCAREAIFTYWGRGTLVTVSSASTKGPSVFPLAPSSKSTSGGTAALGCLVKDYFPEPVTVSWNSGALTSGVHTFPAVLQSSGLYSLSSVVTVPSSSLGTQTYICNVNHKPSNTKVDKKVEPKSCDKTHTCPPCPAPELLGGPSVFLFPPKPKDTLMISRTPEVTCVVVDVSHEDPEVKFNWYVDGVEVHNAKTKPREEQYNSTYRVVSVLTVLHQDWLNGKEYKCKVSNKALPAPIEKTISKAKGQPREPQVYTLPPCREEMTKNQVSLWCLVKGFYPSDIAVEWESNGQPENNYKTTPPVLDSDGSFFLYSKLTVDKSRWQQGNVFSCSVMHEALHNHYTQKSLSLSPGK

SEQ ID NO: 132 - protein, 582 aa, synthetic construct
  REGION 1..582: note = EPB11 LC
DIQMTQSPGTLSVSPGERATLSCRASQSVSSNLAWYQQKPGQAPRLLIYGASTRATGIPARFSGSGSGTEFTLTISSMQSEDFAVYYCQQYNNWPPLTFGGGTKVEIKRTVAAPSVFIFPPDIQLTQSPSSLSLSPGERVTLSCKASQDINNYLSWYQQKPDQAPKLLIKRANRLVDGVPDRFSGSGSGTDFTLKISRVEAEDVGVYYCLKYDEFPYTFGCGTRLEIKRTVAAPSVFIFPPSDEQLKSGTASVVCLLNNFYPREAKVQWKVDNALQSGNSQESVTEQDSKDSTYSLSSTLTLSKADYEKHKVYACEVTHQGLSSPVTKSFNRGECGGGGSGGGGSGGGGSEPKSSDKTHTCPPCPAPELLGGPSVFLFPPKPKDTLMISRTPEVTCVVVDVSHEDPEVKFNWYVDGVEVHNAKTKPREEQYNSTYRVVSVLTVLHQDWLNGKEYKCKVSNKALPAPIEKTISKAKGQPREPQVYTLPPCREEMTKNQVSLWCLVKGFYPSDIAVEWESNGQPENNYKTTPPVLDSDGSFFLYSKLTVDKSRWQQGNVFSCSVMHEALHNHYTQKSLSLSPGK

SEQ ID NO: 133 - protein, 578 aa, synthetic construct
  REGION 1..578: note = EPB12 HC
EVQLVESGGGVVRPGGSLRLSCAASGFTVSDYSMNWVRQAPGKGLEWIGFIRNKANAYTTEYSASVKGRFTISRDDSKNTLYLQMNSLKTEDTAVYYCTTYPRYHAMDSWGQGTMVTVSSASTKGPSVFPLAPQVQLLESGGGLVQPGGSLRLSCAASGFTFSSYTMSWVRQAPGQCLEWMGTISSGGTYTYYPDSVKGRFTISRDNAKNSLYLQMNSLRAEDTAVYYCAREAIFTYWGRGTLVTVSSASTKGPSVFPLAPSSKSTSGGTAALGCLVKDYFPEPVTVSWNSGALTSGVHTFPAVLQSSGLYSLSSVVTVPSSSLGTQTYICNVNHKPSNTKVDKKVEPKSCDKTHTCPPCPAPELLGGPSVFLFPPKPKDTLMISRTPEVTCVVVDVSHEDPEVKFNWYVDGVEVHNAKTKPREEQYNSTYRVVSVLTVLHQDWLNGKEYKCKVSNKALPAPIEKTISKAKGQPREPQVYTLPPCREEMTKNQVSLWCLVKGFYPSDIAVEWESNGQPENNYKTTPPVLDSDGSFFLYSKLTVDKSRWQQGNVFSCSVMHEALHNHYTQKSLSLSPGK

SEQ ID NO: 134 - protein, 581 aa, synthetic construct
  REGION 1..581: note = EPB12 LC
AIQLTQSPSSLSASVGDRVTITCRASQSISNNLHWYLQKPGQSPQLLIYYGFQSISGVPSRFSGSGSGTDFTLTISSLQPEDFATYYCQQANSWPLTFGGGTKLEIKRTVAAPSVFIFPPDIQLTQSPSSLSLSPGERVTLSCKASQDINNYLSWYQQKPDQAPKLLIKRANRLVDGVPDRFSGSGSGTDFTLKISRVEAEDVGVYYCLKYDEFPYTFGCGTRLEIKRTVAAPSVFIFPPSDEQLKSGTASVVCLLNNFYPREAKVQWKVDNALQSGNSQESVTEQDSKDSTYSLSSTLTLSKADYEKHKVYACEVTHQGLSSPVTKSFNRGECGGGGSGGGGSGGGGSEPKSSDKTHTCPPCPAPELLGGPSVFLFPPKPKDTLMISRTPEVTCVVVDVSHEDPEVKFNWYVDGVEVHNAKTKPREEQYNSTYRVVSVLTVLHQDWLNGKEYKCKVSNKALPAPIEKTISKAKGQPREPQVYTLPPCREEMTKNQVSLWCLVKGFYPSDIAVEWESNGQPENNYKTTPPVLDSDGSFFLYSKLTVDKSRWQQGNVFSCSVMHEALHNHYTQKSLSLSPGK

SEQ ID NO: 135 - protein, 129 aa, synthetic construct
  REGION 1..129: note = VH1 of EPB01
EVQLLESGGGLVQPGGSLRLSCAASGFTFSRYQMMWVRQAPGKGLEWVSSISPSGGVTLYADSVKGRFTISRDNSKNTLYLQMNSLRAEDTAVYYCTRELLGTVVVPVAWKMRGYFDYWGQLTLVTVSS

SEQ ID NO: 136 - protein, 128 aa, synthetic construct
  REGION 1..128: note = VH2 of EPB01
EVQLLESGGGLVQPGGSLRLSCAASGFTFSHYMMAWVRQAPGKCLEWVSRIGPSGGPTHYADSVKGRFTISRDNSKNTLYLQMNSLRAEDTAVYYCAGYDSGYDYVAVAGPAEYFQHWGQGTLVTVSS

SEQ ID NO: 137 - protein, 108 aa, synthetic construct
  REGION 1..108: note = VL1 of EPB01
DIQMTQSPGTLSVSPGERATLSCRASQSVSSNLAWYQQKPGQAPRLLIYGASTRATGIPARFSGSGSGTEFTLTISSMQSEDFAVYYCQQYNNWPPLTFGGGTKVEIK

SEQ ID NO: 138 - protein, 107 aa, synthetic construct
  REGION 1..107: note = VL2 of EPB01
DIQMTQSPSSLSASVGDRVTITCRASQSISTWLAWYQQKPGKAPKLLIYKASNLHTGVPSRFSGSGSGTEFSLTISGLQPDDFATYYCQQYNSYSRTFGCGTKVEIK

SEQ ID NO: 139 - protein, 120 aa, synthetic construct
  REGION 1..120: note = VH1 of EPB02
EVQLVESGGGVVRPGGSLRLSCAASGFTVSDYSMNWVRQAPGKGLEWIGFIRNKANAYTTEYSASVKGRFTISRDDSKNTLYLQMNSLKTEDTAVYYCTTYPRYHAMDSWGQGTMVTVSS

SEQ ID NO: 140 - protein, 107 aa, synthetic construct
  REGION 1..107: note = VL1 of EPB02
AIQLTQSPSSLSASVGDRVTITCRASQSISNNLHWYLQKPGQSPQLLIYYGFQSISGVPSRFSGSGSGTDFTLTISSLQPEDFATYYCQQANSWPLTFGGGTKLEIK

SEQ ID NO: 141 - protein, 115 aa, synthetic construct
  REGION 1..115: note = VH1 of EPB03
QVQLLESGGGLVQPGGSLRLSCAASGFTFSSYTMSWVRQAPGQALEWMGTISSGGTYTYYPDSVKGRFTISRDNAKNSLYLQMNSLRAEDTAVYYCAREAIFTYWGRGTLVTVSS

SEQ ID NO: 142 - protein, 107 aa, synthetic construct
  REGION 1..107: note = VL1 of EPB03
DIQLTQSPSSLSLSPGERVTLSCKASQDINNYLSWYQQKPDQAPKLLIKRANRLVDGVPDRFSGSGSGTDFTLKISRVEAEDVGVYYCLKYDEFPYTFGQGTRLEIK

SEQ ID NO: 143 - protein, 128 aa, synthetic construct
  REGION 1..128: note = VH1 of EPB04
EVQLLESGGGLVQPGGSLRLSCAASGFTFSHYMMAWVRQAPGKGLEWVSRIGPSGGPTHYADSVKGRFTISRDNSKNTLYLQMNSLRAEDTAVYYCAGYDSGYDYVAVAGPAEYFQHWGQGTLVTVSS

SEQ ID NO: 144 - protein, 129 aa, synthetic construct
  REGION 1..129: note = VH2 of EPB04
EVQLLESGGGLVQPGGSLRLSCAASGFTFSRYQMMWVRQAPGKCLEWVSSISPSGGVTLYADSVKGRFTISRDNSKNTLYLQMNSLRAEDTAVYYCTRELLGTVVVPVAWKMRGYFDYWGQLTLVTVSS

SEQ ID NO: 145 - protein, 107 aa, synthetic construct
  REGION 1..107: note = VL1 of EPB04
DIQMTQSPSSLSASVGDRVTITCRASQSISTWLAWYQQKPGKAPKLLIYKASNLHTGVPSRFSGSGSGTEFSLTISGLQPDDFATYYCQQYNSYSRTFGQGTKVEIK

SEQ ID NO: 146 - protein, 108 aa, synthetic construct
  REGION 1..108: note = VL2 of EPB04
DIQMTQSPGTLSVSPGERATLSCRASQSVSSNLAWYQQKPGQAPRLLIYGASTRATGIPARFSGSGSGTEFTLTISSMQSEDFAVYYCQQYNNWPPLTFGCGTKVEIK

SEQ ID NO: 147 - protein, 120 aa, synthetic construct
  REGION 1..120: note = VH2 of EPB05
EVQLVESGGGVVRPGGSLRLSCAASGFTVSDYSMNWVRQAPGKCLEWIGFIRNKANAYTTEYSASVKGRFTISRDDSKNTLYLQMNSLKTEDTAVYYCTTYPRYHAMDSWGQGTMVTVSS

SEQ ID NO: 148 - protein, 107 aa, synthetic construct
  REGION 1..107: note = VL2 of EPB05
AIQLTQSPSSLSASVGDRVTITCRASQSISNNLHWYLQKPGQSPQLLIYYGFQSISGVPSRFSGSGSGTDFTLTISSLQPEDFATYYCQQANSWPLTFGCGTKLEIK

SEQ ID NO: 149 - protein, 115 aa, synthetic construct
  REGION 1..115: note = VH2 of EPB06
QVQLLESGGGLVQPGGSLRLSCAASGFTFSSYTMSWVRQAPGQCLEWMGTISSGGTYTYYPDSVKGRFTISRDNAKNSLYLQMNSLRAEDTAVYYCAREAIFTYWGRGTLVTVSS

SEQ ID NO: 150 - protein, 107 aa, synthetic construct
  REGION 1..107: note = VL2 of EPB06
DIQLTQSPSSLSLSPGERVTLSCKASQDINNYLSWYQQKPDQAPKLLIKRANRLVDGVPDRFSGSGSGTDFTLKISRVEAEDVGVYYCLKYDEFPYTFGCGTRLEIK

SEQ ID NO: 151 - protein, 5 aa, synthetic construct
  REGION 1..5: note = V1 CDR-H1 of EPB01
RYQMM

SEQ ID NO: 152 - protein, 17 aa, synthetic construct
  REGION 1..17: note = V1 CDR-H2 of EPB01
SISPSGGVTLYADSVKG

SEQ ID NO: 153 - protein, 20 aa, synthetic construct
  REGION 1..20: note = V1 CDR-H3 of EPB01
ELLGTVVVPVAWKMRGYFDY

SEQ ID NO: 154 - protein, 11 aa, synthetic construct
  REGION 1..11: note = V1 CDR-L1 of EPB01
RASQSVSSNLA

SEQ ID NO: 155 - protein, 7 aa, synthetic construct
  REGION 1..7: note = V1 CDR-L2 of EPB01
GASTRAT

SEQ ID NO: 156 - protein, 10 aa, synthetic construct
  REGION 1..10: note = V1 CDR-L3 of EPB01
QQYNNWPPLT

SEQ ID NO: 157 - protein, 5 aa, synthetic construct
  REGION 1..5: note = V2 CDR-H1 of EPB01
HYMMA

SEQ ID NO: 158 - protein, 17 aa, synthetic construct
  REGION 1..17: note = V2 CDR-H2 of EPB01
RIGPSGGPTHYADSVKG

SEQ ID NO: 159 - protein, 19 aa, synthetic construct
  REGION 1..19: note = V2 CDR-H3 of EPB01
YDSGYDYVAVAGPAEYFQH

SEQ ID NO: 160 - protein, 11 aa, synthetic construct
  REGION 1..11: note = V2 CDR-L1 of EPB01
RASQSISTWLA

SEQ ID NO: 161 - protein, 7 aa, synthetic construct
  REGION 1..7: note = V2 CDR-L2 of EPB01
KASNLHT

SEQ ID NO: 162 - protein, 9 aa, synthetic construct
  REGION 1..9: note = V2 CDR-L3 of EPB01
QQYNSYSRT

SEQ ID NO: 163 - protein, 5 aa, synthetic construct
  REGION 1..5: note = V1 CDR-H1 of EPB02
DYSMN

SEQ ID NO: 164 - protein, 19 aa, synthetic construct
  REGION 1..19: note = V1 CDR-H2 of EPB02
FIRNKANAYTTEYSASVKG

SEQ ID NO: 165 - protein, 10 aa, synthetic construct
  REGION 1..10: note = V1 CDR-H3 of EPB02
YPRYHAMDSW

SEQ ID NO: 166 - protein, 11 aa, synthetic construct
  REGION 1..11: note = V1 CDR-L1 of EPB02
RASQSISNNLH

SEQ ID NO: 167 - protein, 7 aa, synthetic construct
  REGION 1..7: note = V1 CDR-L2 of EPB02
YGFQSIS

SEQ ID NO: 168 - protein, 9 aa, synthetic construct
  REGION 1..9: note = V1 CDR-L3 of EPB02
QQANSWPLT

SEQ ID NO: 169 - protein, 5 aa, synthetic construct
  REGION 1..5: note = V1 CDR-H1 of EPB03
SYTMS

SEQ ID NO: 170 - protein, 17 aa, synthetic construct
  REGION 1..17: note = V1 CDR-H2 of EPB03
TISSGGTYTYYPDSVKG

SEQ ID NO: 171 - protein, 7 aa, synthetic construct
  REGION 1..7: note = V1 CDR-H3 of EPB03
EAIFTYW

SEQ ID NO: 172 - protein, 11 aa, synthetic construct
  REGION 1..11: note = V1 CDR-L1 of EPB03
KASQDINNYLS

SEQ ID NO: 173 - protein, 7 aa, synthetic construct
  REGION 1..7: note = V1 CDR-L2 of EPB03
RANRLVD

SEQ ID NO: 174 - protein, 9 aa, synthetic construct
  REGION 1..9: note = V1 CDR-L3 of EPB03
LKYDEFPYT

SEQ ID NO: 175 - protein, 5 aa, synthetic construct
  REGION 1..5: note = VH-CDR1 of Cetuximab
NYGVH

SEQ ID NO: 176 - protein, 16 aa, synthetic construct
  REGION 1..16: note = VH-CDR2 of Cetuximab
VIWSGGNTDYNTPFTS

SEQ ID NO: 177 - protein, 11 aa, synthetic construct
  REGION 1..11: note = VH-CDR3 of Cetuximab
ALTYYDYEFAY

SEQ ID NO: 178 - protein, 11 aa, synthetic construct
  REGION 1..11: note = VL-CDR1 of Cetuximab
RASQSIGTNIH

SEQ ID NO: 179 - protein, 7 aa, synthetic construct
  REGION 1..7: note = VL-CDR2 of Cetuximab
YASESIS

SEQ ID NO: 180 - protein, 9 aa, synthetic construct
  REGION 1..9: note = VL-CDR3 of Cetuximab
QQNNNWPTT

SEQ ID NO: 181 - protein, 5 aa, synthetic construct
  REGION 1..5: note = VH-CDR1 of Panitumumab
DYYWT

SEQ ID NO: 182 - protein, 16 aa, synthetic construct
  REGION 1..16: note = VH-CDR2 of Panitumumab
HIYYSGNTNYNPSLKS

SEQ ID NO: 183 - protein, 9 aa, synthetic construct
  REGION 1..9: note = VH-CDR3 of Panitumumab
DRVTGAFDI

SEQ ID NO: 184 - protein, 11 aa, synthetic construct
  REGION 1..11: note = VL-CDR1 of Panitumumab
QASQDISNYLN

SEQ ID NO: 185 - protein, 7 aa, synthetic construct
  REGION 1..7: note = VL-CDR2 of Panitumumab
DASNLET

SEQ ID NO: 186 - protein, 9 aa, synthetic construct
  REGION 1..9: note = VL-CDR3 of Panitumumab
QHFDHLPLA

SEQ ID NO: 187 - protein, 5 aa, synthetic construct
  REGION 1..5: note = VH-CDR1 of Necitumumab
DYYWS

SEQ ID NO: 188 - protein, 16 aa, synthetic construct
  REGION 1..16: note = VH-CDR2 of Necitumumab
YIYYSGSTDYNPSLKS

SEQ ID NO: 189 - protein, 11 aa, synthetic construct
  REGION 1..11: note = VH-CDR3 of Necitumumab
VSIFGVGTFDY

SEQ ID NO: 190 - protein, 11 aa, synthetic construct
  REGION 1..11: note = VL-CDR1 of Necitumumab
VSIFGVGTFDY

SEQ ID NO: 191 - protein, 7 aa, synthetic construct
  REGION 1..7: note = VL-CDR2 of Necitumumab
DASNRAT

SEQ ID NO: 192 - protein, 9 aa, synthetic construct
  REGION 1..9: note = VL-CDR3 of Necitumumab
HQYGSTPLT

SEQ ID NO: 193 - protein, 5 aa, synthetic construct
  REGION 1..5: note = VH-CDR1 of Imgatuzumab
DYKIH

SEQ ID NO: 194 - protein, 17 aa, synthetic construct
  REGION 1..17: note = VH-CDR2 of Imgatuzumab
YFNPNSGYSTYAQKFQG

SEQ ID NO: 195 - protein, 11 aa, synthetic construct
  REGION 1..11: note = VH-CDR3 of Imgatuzumab
LSPGGYYVMDA

SEQ ID NO: 196 - protein, 11 aa, synthetic construct
  REGION 1..11: note = VL-CDR1 of Imgatuzumab
RASQGINNYLN

SEQ ID NO: 197 - protein, 7 aa, synthetic construct
  REGION 1..7: note = VL-CDR2 of Imgatuzumab
NTNNLQT

SEQ ID NO: 198 - protein, 8 aa, synthetic construct
  REGION 1..8: note = VL-CDR3 of Imgatuzumab
LQHNSFPT

SEQ ID NO: 199 - protein, 5 aa, synthetic construct
  REGION 1..5: note = VH-CDR1 of Depatuxizumab
DFAWN

SEQ ID NO: 200 - protein, 16 aa, synthetic construct
  REGION 1..16: note = VH-CDR2 of Depatuxizumab
YISYSGNTRYQPSLKS

SEQ ID NO: 201 - protein, 7 aa, synthetic construct
  REGION 1..7: note = VH-CDR3 of Depatuxizumab
AGRGFPY

SEQ ID NO: 202 - protein, 11 aa, synthetic construct
  REGION 1..11: note = VL-CDR1 of Depatuxizumab
HSSQDINSNIG

SEQ ID NO: 203 - protein, 7 aa, synthetic construct
  REGION 1..7: note = VL-CDR2 of Depatuxizumab
HGTNLDD

SEQ ID NO: 204 - protein, 9 aa, synthetic construct
  REGION 1..9: note = VL-CDR3 of Depatuxizumab
VQYAQFPWT

SEQ ID NO: 205 - protein, 16 aa, synthetic construct
  REGION 1..16: note = VH-CDR2 of Losatuxizumab
YISYNGNTRYQPSLKS

SEQ ID NO: 206 - protein, 7 aa, synthetic construct
  REGION 1..7: note = VH-CDR3 of Losatuxizumab
ASRGFPY

SEQ ID NO: 207 - protein, 5 aa, synthetic construct
  REGION 1..5: note = VH-CDR1 of Etevritamab
NYGMH

SEQ ID NO: 208 - protein, 17 aa, synthetic construct
  REGION 1..17: note = VH-CDR2 of Etevritamab
VIWYDGSDKYYADSVRG

SEQ ID NO: 209 - protein, 15 aa, synthetic construct
  REGION 1..15: note = VH-CDR3 of Etevritamab
DGYDILTGNPRDFDY

SEQ ID NO: 210 - protein, 16 aa, synthetic construct
  REGION 1..16: note = VL-CDR1 of Etevritamab
RSSQSLVHSDGNTYLS

SEQ ID NO: 211 - protein, 7 aa, synthetic construct
  REGION 1..7: note = VL-CDR2 of Etevritamab
RISRRFS

SEQ ID NO: 212 - protein, 9 aa, synthetic construct
  REGION 1..9: note = VL-CDR3 of Etevritamab
MQSTHVPRT

SEQ ID NO: 213 - protein, 5 aa, synthetic construct
  REGION 1..5: note = VH-CDR1 of AMG-595
SYGMH

SEQ ID NO: 214 - protein, 17 aa, synthetic construct
  REGION 1..17: note = VH-CDR2 of AMG-595
VIWYDGSNKYYVDSVKG

SEQ ID NO: 215 - protein, 11 aa, synthetic construct
  REGION 1..11: note = VH-CDR3 of AMG-595
DGWQQLAPFDY

SEQ ID NO: 216 - protein, 7 aa, synthetic construct
  REGION 1..7: note = VL-CDR2 of AMG-595
KISNRFS

SEQ ID NO: 217 - protein, 9 aa, synthetic construct
  REGION 1..9: note = VL-CDR3 of AMG-595
MQATQLPRT

SEQ ID NO: 218 - protein, 5 aa, synthetic construct
  REGION 1..5: note = VH-CDR1 of Atezolizumab
DSWIH

SEQ ID NO: 219 - protein, 17 aa, synthetic construct
  REGION 1..17: note = VH-CDR2 of Atezolizumab
WISPYGGSTYYADSVKG

SEQ ID NO: 220 - protein, 9 aa, synthetic construct
  REGION 1..9: note = VH-CDR3 of Atezolizumab
RHWPGGFDY

SEQ ID NO: 221 - protein, 11 aa, synthetic construct
  REGION 1..11: note = VL-CDR1 of Atezolizumab
RASQDVSTAVA

SEQ ID NO: 222 - protein, 7 aa, synthetic construct
  REGION 1..7: note = VL-CDR2 of Atezolizumab
SASFLYS

SEQ ID NO: 223 - protein, 9 aa, synthetic construct
  REGION 1..9: note = VL-CDR3 of Atezolizumab
QQYLYHPAT

SEQ ID NO: 224 - protein, 5 aa, synthetic construct
  REGION 1..5: note = VH-CDR1 of Avelumab
SSYIM

SEQ ID NO: 225 - protein, 17 aa, synthetic construct
  REGION 1..17: note = VH-CDR2 of Avelumab
SIYPSGGITFYADTVKG

SEQ ID NO: 226 - protein, 11 aa, synthetic construct
  REGION 1..11: note = VH-CDR3 of Avelumab
IKLGTVTTVDY

SEQ ID NO: 227 - protein, 14 aa, synthetic construct
  REGION 1..14: note = VL-CDR1 of Avelumab
TGTSSDVGGYNYVS

SEQ ID NO: 228 - protein, 7 aa, synthetic construct
  REGION 1..7: note = VL-CDR2 of Avelumab
DVSNRPS

SEQ ID NO: 229 - protein, 10 aa, synthetic construct
  REGION 1..10: note = VL-CDR3 of Avelumab
SSYTSSSTRV

SEQ ID NO: 230 - protein, 5 aa, synthetic construct
  REGION 1..5: note = VH-CDR1 of Durvalumab
RYWMS

SEQ ID NO: 231 - protein, 17 aa, synthetic construct
  REGION 1..17: note = VH-CDR2 of Durvalumab
NIKQDGSEKYYVDSVKG

SEQ ID NO: 232 - protein, 12 aa, synthetic construct
  REGION 1..12: note = VH-CDR3 of Durvalumab
EGGWFGELAFDY

SEQ ID NO: 233 - protein, 12 aa, synthetic construct
  REGION 1..12: note = VL-CDR1 of Durvalumab
RASQRVSSSYLA

SEQ ID NO: 234 - protein, 7 aa, synthetic construct
  REGION 1..7: note = VL-CDR2 of Durvalumab
DASSRAT

SEQ ID NO: 235 - protein, 9 aa, synthetic construct
  REGION 1..9: note = VL-CDR3 of Durvalumab
QQYGSLPWT

SEQ ID NO: 236 - protein, 5 aa, synthetic construct
  REGION 1..5: note = VH-CDR1 of Onartuzumab or MEM01
SYWLH

SEQ ID NO: 237 - protein, 17 aa, synthetic construct
  REGION 1..17: note = VH-CDR2 of Onartuzumab or MEM01
MIDPSNSDTRFNPNFKD

SEQ ID NO: 238 - protein, 10 aa, synthetic construct
  REGION 1..10: note = VH-CDR3 of Onartuzumab or MEM01
YRSYVTPLDY

SEQ ID NO: 239 - protein, 17 aa, synthetic construct
  REGION 1..17: note = VL-CDR1 of Onartuzumab or MEM01
KSSQSLLYTSSQKNYLA

SEQ ID NO: 240 - protein, 7 aa, synthetic construct
  REGION 1..7: note = VL-CDR2 of Onartuzumab or MEM01
WASTRES

SEQ ID NO: 241 - protein, 9 aa, synthetic construct
  REGION 1..9: note = VL-CDR3 of Onartuzumab or MEM01
QQYYAYPWT

SEQ ID NO: 242 - protein, 5 aa, synthetic construct
  REGION 1..5: note = VH-CDR1 of Emibetuzumab
DYYMH

SEQ ID NO: 243 - protein, 17 aa, synthetic construct
  REGION 1..17: note = VH-CDR2 of Emibetuzumab
RVNPNRRGTTYNQKFEG

SEQ ID NO: 244 - protein, 6 aa, synthetic construct
  REGION 1..6: note = VH-CDR3 of Emibetuzumab
ANWLDY

SEQ ID NO: 245 - protein, 12 aa, synthetic construct
  REGION 1..12: note = VL-CDR1 of Emibetuzumab
SVSSSVSSIYLH

SEQ ID NO: 246 - protein, 7 aa, synthetic construct
  REGION 1..7: note = VL-CDR2 of Emibetuzumab
STSNLAS

SEQ ID NO: 247 - protein, 9 aa, synthetic construct
  REGION 1..9: note = VL-CDR3 of Emibetuzumab
QVYSGYPLT

SEQ ID NO: 248 - protein, 5 aa, synthetic construct
  REGION 1..5: note = VH-CDR1 of Telisotuzumab
AYTMH

SEQ ID NO: 249 - protein, 17 aa, synthetic construct
  REGION 1..17: note = VH-CDR2 of Telisotuzumab
WIKPNNGLANYAQKFQG

SEQ ID NO: 250 - protein, 9 aa, synthetic construct
  REGION 1..9: note = VH-CDR3 of Telisotuzumab
SEITTEFDY

SEQ ID NO: 251 - protein, 15 aa, synthetic construct
  REGION 1..15: note = VL-CDR1 of Telisotuzumab
KSSESVDSYANSFLH

SEQ ID NO: 252 - protein, 7 aa, synthetic construct
  REGION 1..7: note = VL-CDR2 of Telisotuzumab
RASTRES

SEQ ID NO: 253 - protein, 9 aa, synthetic construct
  REGION 1..9: note = VL-CDR3 of Telisotuzumab
QQSKEDPLT

SEQ ID NO: 254 - protein, 5 aa, synthetic construct
  REGION 1..5: note = VH-CDR1 of Datopotamab
TAGMQ

SEQ ID NO: 255 - protein, 17 aa, synthetic construct
  REGION 1..17: note = VH-CDR2 of Datopotamab
WINTHSGVPKYAEDFKG

SEQ ID NO: 256 - protein, 12 aa, synthetic construct
  REGION 1..12: note = VH-CDR3 of Datopotamab
SGFGSSYWYFDV

SEQ ID NO: 257 - protein, 11 aa, synthetic construct
  REGION 1..11: note = VL-CDR1 of Datopotamab
KASQDVSTAVA

SEQ ID NO: 258 - protein, 7 aa, synthetic construct
  REGION 1..7: note = VL-CDR2 of Datopotamab
SASYRYT

SEQ ID NO: 259 - protein, 9 aa, synthetic construct
  REGION 1..9: note = VL-CDR3 of Datopotamab
QQHYITPLT

SEQ ID NO: 260 - protein, 5 aa, synthetic construct
  REGION 1..5: note = VH-CDR1 of Sacituzumab
NYGMN

SEQ ID NO: 261 - protein, 17 aa, synthetic construct
  REGION 1..17: note = VH-CDR2 of Sacituzumab
WINTYTGEPTYTDDFKG

SEQ ID NO: 262 - protein, 12 aa, synthetic construct
  REGION 1..12: note = VH-CDR3 of Sacituzumab
GGFGSSYWYFDV

SEQ ID NO: 263 - protein, 11 aa, synthetic construct
  REGION 1..11: note = VL-CDR1 of Sacituzumab
KASQDVSIAVA

SEQ ID NO: 264 - protein, 7 aa, synthetic construct
  REGION 1..7: note = VL-CDR2 of Sacituzumab
SASYRYT

SEQ ID NO: 265 - protein, 9 aa, synthetic construct
  REGION 1..9: note = VL-CDR3 of Sacituzumab
QQHYITPLT

SEQ ID NO: 266 - protein, 5 aa, synthetic construct
  REGION 1..5: note = VH-CDR1 of Rovalpituzumab
NYGMN

SEQ ID NO: 267 - protein, 17 aa, synthetic construct
  REGION 1..17: note = VH-CDR2 of Rovalpituzumab
WINTYTGEPTYADDFKG

SEQ ID NO: 268 - protein, 9 aa, synthetic construct
  REGION 1..9: note = VH-CDR3 of Rovalpituzumab
IGDSSPSDY

SEQ ID NO: 269 - protein, 11 aa, synthetic construct
  REGION 1..11: note = VL-CDR1 of Rovalpituzumab
KASQSVSNDVV

SEQ ID NO: 270 - protein, 7 aa, synthetic construct
  REGION 1..7: note = VL-CDR2 of Rovalpituzumab
YASNRYT

SEQ ID NO: 271 - protein, 9 aa, synthetic construct
  REGION 1..9: note = VL-CDR3 of Rovalpituzumab
QQDYTSPWT

SEQ ID NO: 272 - protein, 5 aa, synthetic construct
  source 1..5: note = VH-CDR1 of Tarlatamab
SYYWS

SEQ ID NO: 273 - protein, 16 aa, synthetic construct
  REGION 1..16: note = VH-CDR2 of Tarlatamab
YVYYSGTTNYNPSLKS

SEQ ID NO: 274 - protein, 10 aa, synthetic construct
  REGION 1..10: note = VH-CDR3 of Tarlatamab
IAVTGFYFDY

SEQ ID NO: 275 - protein, 12 aa, synthetic construct
  REGION 1..12: note = VL-CDR1 of Tarlatamab
RASQRVNNNYLA

SEQ ID NO: 276 - protein, 7 aa, synthetic construct
  REGION 1..7: note = VL-CDR2 of Tarlatamab
GASSRAT

SEQ ID NO: 277 - protein, 9 aa, synthetic construct
  REGION 1..9: note = VL-CDR3 of Tarlatamab
QQYDRSPLT

SEQ ID NO: 278 - protein, 5 aa, synthetic construct
  REGION 1..5: note = VH-CDR1 of Belantamab
NYWMH

SEQ ID NO: 279 - protein, 17 aa, synthetic construct
  REGION 1..17: note = VH-CDR2 of Belantamab
ATYRGHSDTYYNQKFKG

SEQ ID NO: 280 - protein, 12 aa, synthetic construct
  REGION 1..12: note = VH-CDR3 of Belantamab
GAIYDGYDVLDN

SEQ ID NO: 281 - protein, 11 aa, synthetic construct
  REGION 1..11: note = VL-CDR1 of Belantamab
SASQDISNYLN

SEQ ID NO: 282 - protein, 7 aa, synthetic construct
  REGION 1..7: note = VL-CDR2 of Belantamab
YTSNLHS

SEQ ID NO: 283 - protein, 9 aa, synthetic construct
  REGION 1..9: note = VL-CDR3 of Belantamab
QQYRKLPWT

SEQ ID NO: 284 - protein, 5 aa, synthetic construct
  REGION 1..5: note = VH-CDR1 of Ladiratuzumab
DYYMH

SEQ ID NO: 285 - protein, 17 aa, synthetic construct
  REGION 1..17: note = VH-CDR2 of Ladiratuzumab
WIDPENGDTEYGPKFQG

SEQ ID NO: 286 - protein, 11 aa, synthetic construct
  REGION 1..11: note = VH-CDR3 of Ladiratuzumab
HNAHYGTWFAY

SEQ ID NO: 287 - protein, 16 aa, synthetic construct
  REGION 1..16: note = VL-CDR1 of Ladiratuzumab
RSSQSLLHSSGNTYLE

SEQ ID NO: 288 - protein, 7 aa, synthetic construct
  REGION 1..7: note = VL-CDR2 of Ladiratuzumab
KISTRFS

SEQ ID NO: 289 - protein, 9 aa, synthetic construct
  REGION 1..9: note = VL-CDR3 of Ladiratuzumab
FQGSHVPYT

SEQ ID NO: 290 - protein, 5 aa, synthetic construct
  REGION 1..5: note = VH-CDR1 of Aprutumab
SYAMS

SEQ ID NO: 291 - protein, 17 aa, synthetic construct
  REGION 1..17: note = VH-CDR2 of Aprutumab
AISGSGTSTYYADSVKG

SEQ ID NO: 292 - protein, 13 aa, synthetic construct
  REGION 1..13: note = VH-CDR3 of Aprutumab
VRYNWNHGDWFDP

SEQ ID NO: 293 - protein, 13 aa, synthetic construct
  REGION 1..13: note = VL-CDR1 of Aprutumab
SGSSSNIGNNYVS

SEQ ID NO: 294 - protein, 7 aa, synthetic construct
  REGION 1..7: note = VL-CDR2 of Aprutumab
ENYNRPA

SEQ ID NO: 295 - protein, 11 aa, synthetic construct
  REGION 1..11: note = VL-CDR3 of Aprutumab
SSWDDSLNYWV

SEQ ID NO: 296 - protein, 5 aa, synthetic construct
  REGION 1..5: note = VH-CDR1 of Bemarituzumab
TYNVH

SEQ ID NO: 297 - protein, 17 aa, synthetic construct
  REGION 1..17: note = VH-CDR2 of Bemarituzumab
SIYPDNGDTSYNQNFKG

SEQ ID NO: 298 - protein, 5 aa, synthetic construct
  REGION 1..5: note = VH-CDR3 of Bemarituzumab
GDFAY

SEQ ID NO: 299 - protein, 11 aa, synthetic construct
  REGION 1..11: note = VL-CDR1 of Bemarituzumab
KASQGVSNDVA

SEQ ID NO: 300 - protein, 7 aa, synthetic construct
  REGION 1..7: note = VL-CDR2 of Bemarituzumab
SASYRYT

SEQ ID NO: 301 - protein, 9 aa, synthetic construct
  REGION 1..9: note = VL-CDR3 of Bemarituzumab
QQHSTTPYT

SEQ ID NO: 302 - protein, 5 aa, synthetic construct
  REGION 1..5: note = VH-CDR1 of Vofatamab
STGIS

SEQ ID NO: 303 - protein, 17 aa, synthetic construct
  REGION 1..17: note = VH-CDR2 of Vofatamab
RIYPTSGSTNYADSVKG

SEQ ID NO: 304 - protein, 18 aa, synthetic construct
  REGION 1..18: note = VH-CDR3 of Vofatamab
TYGIYDLYVDYTEYVMDY

SEQ ID NO: 305 - protein, 11 aa, synthetic construct
  REGION 1..11: note = VL-CDR1 of Vofatamab
RASQDVDTSLA

SEQ ID NO: 306 - protein, 7 aa, synthetic construct
  REGION 1..7: note = VL-CDR2 of Vofatamab
SASFLYS

SEQ ID NO: 307 - protein, 9 aa, synthetic construct
  REGION 1..9: note = VL-CDR3 of Vofatamab
QQSTGHPQT

SEQ ID NO: 308 - protein, 5 aa, synthetic construct
  REGION 1..5: note = VH-CDR1 of Ramucirumab
SYSMN

SEQ ID NO: 309 - protein, 17 aa, synthetic construct
  REGION 1..17: note = VH-CDR2 of Ramucirumab
SISSSSSYIYYADSVKG

SEQ ID NO: 310 - protein, 7 aa, synthetic construct
  REGION 1..7: note = VH-CDR3 of Ramucirumab
VTDAFDI

SEQ ID NO: 311 - protein, 11 aa, synthetic construct
  REGION 1..11: note = VL-CDR1 of Ramucirumab
RASQGIDNWLG

SEQ ID NO: 312 - protein, 7 aa, synthetic construct
  REGION 1..7: note = VL-CDR2 of Ramucirumab
DASNLDT

SEQ ID NO: 313 - protein, 9 aa, synthetic construct
  REGION 1..9: note = VL-CDR3 of Ramucirumab
QQAKAFPPT

SEQ ID NO: 314 - protein, 5 aa, synthetic construct
  REGION 1..5: note = VH-CDR1 of Rituximab
SYNMH

SEQ ID NO: 315 - protein, 17 aa, synthetic construct
  REGION 1..17: note = VH-CDR2 of Rituximab
AIYPGNGDTSYNQKFKG

SEQ ID NO: 316 - protein, 12 aa, synthetic construct
  REGION 1..12: note = VH-CDR3 of Rituximab
STYYGGDWYFNV

SEQ ID NO: 317 - protein, 16 aa, synthetic construct
  REGION 1..16: note = VL-CDR1 of Rituximab
RSSKSLLHSNGITYLY

SEQ ID NO: 318 - protein, 7 aa, synthetic construct
  REGION 1..7: note = VL-CDR2 of Rituximab
QMSNLVS

SEQ ID NO: 319 - protein, 9 aa, synthetic construct
  REGION 1..9: note = VL-CDR3 of Rituximab
AQNLELPYT

SEQ ID NO: 320 - protein, 5 aa, synthetic construct
  REGION 1..5: note = VH-CDR1 of Obinutuzumab
YSWIN

SEQ ID NO: 321 - protein, 17 aa, synthetic construct
  REGION 1..17: note = VH-CDR2 of Obinutuzumab
RIFPGDGDTDYNGKFKG

SEQ ID NO: 322 - protein, 10 aa, synthetic construct
  REGION 1..10: note = VH-CDR3 of Obinutuzumab
NVFDGYWLVY

SEQ ID NO: 323 - protein, 11 aa, synthetic construct
  REGION 1..11: note = VL-CDR1 of Obinutuzumab
RASQSVSSYLA

SEQ ID NO: 324 - protein, 7 aa, synthetic construct
  REGION 1..7: note = VL-CDR2 of Obinutuzumab
DASNRAT

SEQ ID NO: 325 - protein, 9 aa, synthetic construct
  REGION 1..9: note = VL-CDR3 of Obinutuzumab
QQRSNWPPT

SEQ ID NO: 326 - protein, 5 aa, synthetic construct
  REGION 1..5: note = VH-CDR1 of Daratumumab
SFAMS

SEQ ID NO: 327 - protein, 17 aa, synthetic construct
  REGION 1..17: note = VH-CDR2 of Daratumumab
AISGSGGGTYYADSVKG

SEQ ID NO: 328 - protein, 13 aa, synthetic construct
  REGION 1..13: note = VH-CDR3 of Daratumumab
DKILWFGEPVFDY

SEQ ID NO: 329 - protein, 11 aa, synthetic construct
  REGION 1..11: note = VL-CDR1 of Daratumumab
RASQSVSSYLA

SEQ ID NO: 330 - protein, 7 aa, synthetic construct
  REGION 1..7: note = VL-CDR2 of Daratumumab
DASNRAT

SEQ ID NO: 331 - protein, 9 aa, synthetic construct
  REGION 1..9: note = VL-CDR3 of Daratumumab
QQRSNWPPT

SEQ ID NO: 332 - DNA, 57 bp, synthetic construct
  misc_feature 1..57: note = Signal sequence
  source 1..57: mol_type = other DNA
atgacacgcctcacagttcttgccttgctggctggacttcttgcctcatccagggca

SEQ ID NO: 333 - protein, 19 aa, synthetic construct
  REGION 1..19: note = Signal sequence
MTRLTVLALLAGLLASSRA

SEQ ID NO: 334 - protein, 119 aa, synthetic construct
  REGION 1..119: note = VH of Cetuximab
QVQLKQSGPGLVQPSQSLSITCTVSGFSLTNYGVHWVRQSPGKGLEWLGVIWSGGNTDYNTPFTSRLSINKDNSKSQVFFKMNSLQSNDTAIYYCARALTYYDYEFAYWGQGTLVTVSA

SEQ ID NO: 335 - protein, 107 aa, synthetic construct
  REGION 1..107: note = VL of Cetuximab
DILLTQSPVILSVSPGERVSFSCRASQSIGTNIHWYQQRTNGSPRLLIKYASESISGIPSRFSGSGSGTDFTLSINSVESEDIADYYCQQNNNWPTTFGAGTKLELK

SEQ ID NO: 336 - protein, 119 aa, synthetic construct [sequence omitted]

SEQ ID NO: 337 - protein, 107 aa, synthetic construct [sequence omitted]

SEQ ID NO: 338 - protein, 121 aa, synthetic construct [sequence omitted]

SEQ ID NO: 339 - protein, 107 aa, synthetic construct [sequence omitted]

SEQ ID NO: 340 - protein, 120 aa, synthetic construct [sequence omitted]

SEQ ID NO: 341 - protein, 106 aa, synthetic construct [sequence omitted]

SEQ ID NO: 342 - protein, 116 aa, synthetic construct
  REGION 1..116: note = VH of Depatuxizumab
QVQLQESGPGLVKPSQTLSLTCTVSGYSISSDFAWNWIRQPPGKGLEWMGYISYSGNTRYQPSLKSRITISRDTSKNQFFLKLNSVTAADTATYYCVTAGRGFPYWGQGTLVTVSS

SEQ ID NO: 343 - protein, 107 aa, synthetic construct
  REGION 1..107: note = VL of Depatuxizumab
DIQMTQSPSSMSVSVGDRVTITCHSSQDINSNIGWLQQKPGKSFKGLIYHGTNLDDGVPSRFSGSGSGTDYTLTISSLQPEDFATYYCVQYAQFPWTFGGGTKLEIK

SEQ ID NO: 344 - protein, 116 aa, synthetic construct
  REGION 1..116: note = VH of Losatuxizumab
EVQLQESGPGLVKPSQTLSLTCTVSGYSISRDFAWNWIRQPPGKGLEWMGYISYNGNTRYQPSLKSRITISRDTSKNQFFLKLNSVTAADTATYYCVTASRGFPYWGQGTLVTVSS

SEQ ID NO: 345 - protein, 107 aa, synthetic construct; identical to SEQ ID NO: 343
  REGION 1..107: note = VL of Losatuxizumab

SEQ ID NO: 346 - protein, 124 aa, synthetic construct
  REGION 1..124: note = VH of Etevritamab
QVQLVESGGGVVQSGRSLRLSCAASGFTFRNYGMHWVRQAPGKCLEWVAVIWYDGSDKYYADSVRGRFTISRDNSKNTLYLQMNSLRAEDTAVYYCARDGYDILTGNPRDFDYWGQGTLVTVSS

SEQ ID NO: 347 - protein, 112 aa, synthetic construct
  REGION 1..112: note = VL of Etevritamab
DTVMTQTPLSSHVTLGQPASISCRSSQSLVHSDGNTYLSWLQQRPGQPPRLLIYRISRRFSGVPDRFSGSGAGTDFTLEISRVEAEDVGVYYCMQSTHVPRTFGCGTKVEIK

SEQ ID NO: 348 - protein, 120 aa, synthetic construct
  REGION 1..120: note = VH of AMG-595
QVQLVESGGGVVQPGRSLRLSCAASGFTFSSYGMHWVRQAPGKGLEWVAVIWYDGSNKYYVDSVKGRFTISRDNSKNTLYLQMNSLRAEDTAVYYCARDGWQQLAPFDYWGQGTLVTVSS

SEQ ID NO: 349 - protein, 112 aa, synthetic construct
  REGION 1..112: note = VL of AMG-595
DIVMTQTPLSSPVTLGQPASISCRSSQSLVHSDGNTYLSWLHQRPGQPPRLLIYKISNRFSGVPDRFSGSGAGTAFTLKISRVEAEDVGVYYCMQATQLPRTFGQGTKVEIK

SEQ ID NO: 350 - protein, 118 aa, synthetic construct [sequence omitted]

SEQ ID NO: 351 - protein, 107 aa, synthetic construct [sequence omitted]

SEQ ID NO: 352 - protein, 120 aa, synthetic construct
  REGION 1..120: note = VH of Avelumab
EVQLLESGGGLVQPGGSLRLSCAASGFTFSSYIMMWVRQAPGKGLEWVSSIYPSGGITFYADTVKGRFTISRDNSKNTLYLQMNSLRAEDTAVYYCARIKLGTVTTVDYWGQGTLVTVSS

SEQ ID NO: 353 - protein, 110 aa, synthetic construct
  REGION 1..110: note = VL of Avelumab
QSALTQPASVSGSPGQSITISCTGTSSDVGGYNYVSWYQQHPGKAPKLMIYDVSNRPSGVSNRFSGSKSGNTASLTISGLQAEDEADYYCSSYTSSSTRVFGTGTKVTVL

SEQ ID NO: 354 - protein, 121 aa, synthetic construct
  REGION 1..121: note = VH of Durvalumab
EVQLVESGGGLVQPGGSLRLSCAASGFTFSRYWMSWVRQAPGKGLEWVANIKQDGSEKYYVDSVKGRFTISRDNAKNSLYLQMNSLRAEDTAVYYCAREGGWFGELAFDYWGQGTLVTVSS

SEQ ID NO: 355 - protein, 108 aa, synthetic construct
  REGION 1..108: note = VL of Durvalumab
EIVLTQSPGTLSLSPGERATLSCRASQRVSSSYLAWYQQKPGQAPRLLIYDASSRATGIPDRFSGSGSGTDFTLTISRLEPEDFAVYYCQQYGSLPWTFGQGTKVEIK

SEQ ID NO: 356 - protein, 120 aa, synthetic construct [sequence omitted]

SEQ ID NO: 357 - protein, 107 aa, synthetic construct [sequence omitted]

SEQ ID NO: 358 - protein, 119 aa, synthetic construct [sequence omitted]

SEQ ID NO: 359 - protein, 113 aa, synthetic construct [sequence omitted]

SEQ ID NO: 360 - protein, 115 aa, synthetic construct [sequence omitted]

SEQ ID NO: 361 - protein, 108 aa, synthetic construct [sequence omitted]

SEQ ID NO: 362 - protein, 118 aa, synthetic construct
  REGION 1..118: note = VH of Telisotuzumab
QVQLVQSGAEVKKPGASVKVSCKASGYIFTAYTMHWVRQAPGQGLEWMGWIKPNNGLANYAQKFQGRVTMTRDTSISTAYMELSRLRSDDTAVYYCARSEITTEFDYWGQGTLVTVSS

SEQ ID NO: 363 - protein, 111 aa, synthetic construct
  REGION 1..111: note = VL of Telisotuzumab
DIVMTQSPDSLAVSLGERATINCKSSESVDSYANSFLHWYQQKPGQPPKLLIYRASTRESGVPDRFSGSGSGTDFTLTISSLQAEDVAVYYCQQSKEDPLTFGGGTKVEIK

SEQ ID NO: 364 - protein, 121 aa, synthetic construct
  REGION 1..121: note = VH of Datopotamab
QVQLVQSGAEVKKPGASVKVSCKASGYTFTTAGMQWVRQAPGQGLEWMGWINTHSGVPKYAEDFKGRVTISADTSTSTAYLQLSSLKSEDTAVYYCARSGFGSSYWYFDVWGQGTLVTVSS

SEQ ID NO: 365 - protein, 107 aa, synthetic construct
  REGION 1..107: note = VL of Datopotamab
DIQMTQSPSSLSASVGDRVTITCKASQDVSTAVAWYQQKPGKAPKLLIYSASYRYTGVPSRFSGSGSGTDFTLTISSLQPEDFAVYYCQQHYITPLTFGQGTKLEIK

SEQ ID NO: 366 - protein, 121 aa, synthetic construct
  REGION 1..121: note = VH of Sacituzumab
QVQLQQSGSELKKPGASVKVSCKASGYTFTNYGMNWVKQAPGQGLKWMGWINTYTGEPTYTDDFKGRFAFSLDTSVSTAYLQISSLKADDTAVYFCARGGFGSSYWYFDVWGQGSLVTVSS

SEQ ID NO: 367 - protein, 107 aa, synthetic construct
  REGION 1..107: note = VL of Sacituzumab
DIQLTQSPSSLSASVGDRVSITCKASQDVSIAVAWYQQKPGKAPKLLIYSASYRYTGVPDRFSGSGSGTDFTLTISSLQPEDFAVYYCQQHYITPLTFGAGTKVEIK

SEQ ID NO: 368 - protein, 118 aa, synthetic construct
  REGION 1..118: note = VH of Rovalpituzumab
QVQLVQSGAEVKKPGASVKVSCKASGYTFTNYGMNWVRQAPGQGLEWMGWINTYTGEPTYADDFKGRVTMTTDTSTSTAYMELRSLRSDDTAVYYCARIGDSSPSDYWGQGTLVTVSS

SEQ ID NO: 369 - protein, 107 aa, synthetic construct
  REGION 1..107: note = VL of Rovalpituzumab
EIVMTQSPATLSVSPGERATLSCKASQSVSNDVVWYQQKPGQAPRLLIYYASNRYTGIPARFSGSGSGTEFTLTISSLQSEDFAVYYCQQDYTSPWTFGQGTKLEIK

SEQ ID NO: 370 - protein, 118 aa, synthetic construct
  REGION 1..118: note = VH of Tarlatamab
QVQLQESGPGLVKPSETLSLTCTVSGGSISSYYWSWIRQPPGKCLEWIGYVYYSGTTNYNPSLKSRVTISVDTSKNQFSLKLSSVTAADTAVYYCASIAVTGFYFDYWGQGTLVTVSS

SEQ ID NO: 371 - protein, 108 aa, synthetic construct
  REGION 1..108: note = VL of Tarlatamab
EIVLTQSPGTLSLSPGERVTLSCRASQRVNNNYLAWYQQRPGQAPRLLIYGASSRATGIPDRFSGSGSGTDFTLTISRLEPEDFAVYYCQQYDRSPLTFGCGTKLEIK

SEQ ID NO: 372 - protein, 121 aa, synthetic construct
  REGION 1..121: note = VH of Belantamab
QVQLVQSGAEVKKPGSSVKVSCKASGGTFSNYWMHWVRQAPGQGLEWMGATYRGHSDTYYNQKFKGRVTITADKSTSTAYMELSSLRSEDTAVYYCARGAIYDGYDVLDNWGQGTLVTVSS

SEQ ID NO: 373 - protein, 107 aa, synthetic construct
  REGION 1..107: note = VL of Belantamab
DIQMTQSPSSLSASVGDRVTITCSASQDISNYLNWYQQKPGKAPKLLIYYTSNLHSGVPSRFSGSGSGTDFTLTISSLQPEDFATYYCQQYRKLPWTFGQGTKLEIK

SEQ ID NO: 374 - protein, 120 aa, synthetic construct
  REGION 1..120: note = VH of Ladiratuzumab
QVQLVQSGAEVKKPGASVKVSCKASGLTIEDYYMHWVRQAPGQGLEWMGWIDPENGDTEYGPKFQGRVTMTRDTSINTAYMELSRLRSDDTAVYYCAVHNAHYGTWFAYWGQGTLVTVSS

SEQ ID NO: 375 - protein, 112 aa, synthetic construct
  REGION 1..112: note = VL of Ladiratuzumab
DVVMTQSPLSLPVTLGQPASISCRSSQSLLHSSGNTYLEWYQQRPGQSPRPLIYKISTRFSGVPDRFSGSGSGTDFTLKISRVEAEDVGVYYCFQGSHVPYTFGGGTKVEIK

SEQ ID NO: 376 - protein, 122 aa, synthetic construct
  REGION 1..122: note = VH of Aprutumab
EVQLLESGGGLVQPGGSLRLSCAASGFTFSSYAMSWVRQAPGKGLEWVSAISGSGTSTYYADSVKGRFTISRDNSKNTLYLQMNSLRAEDTAVYYCARVRYNWNHGDWFDPWGQGTLVTVSS

SEQ ID NO: 377 - protein, 110 aa, synthetic construct
  REGION 1..110: note = VL of Aprutumab
QSVLTQPPSASGTPGQRVTISCSGSSSNIGNNYVSWYQQLPGTAPKLLIYENYNRPAGVPDRFSGSKSGTSASLAISGLRSEDEADYYCSSWDDSLNYWVFGGGTKLTVL

SEQ ID NO: 378 - protein, 114 aa, synthetic construct [sequence omitted]

SEQ ID NO: 379 - protein, 107 aa, synthetic construct [sequence omitted]

SEQ ID NO: 380 - protein, 127 aa, synthetic construct [sequence omitted]

SEQ ID NO: 381 - protein, 107 aa, synthetic construct [sequence omitted]

SEQ ID NO: 382 - protein, 116 aa, synthetic construct [sequence omitted]

SEQ ID NO: 383 - protein, 107 aa, synthetic construct [sequence omitted]

SEQ ID NO: 384 - protein, 121 aa, synthetic construct [sequence omitted]

SEQ ID NO: 385 - protein, 106 aa, synthetic construct [sequence omitted]

SEQ ID NO: 386 - protein, 119 aa, synthetic construct
  REGION 1..119: note = VH of Obinutuzumab
QVQLVQSGAEVKKPGSSVKVSCKASGYAFSYSWINWVRQAPGQGLEWMGRIFPGDGDTDYNGKFKGRVTITADKSTSTAYMELSSLRSEDTAVYYCARNVFDGYWLVYWGQGTLVTVSS

SEQ ID NO: 387 - protein, 112 aa, synthetic construct
  REGION 1..112: note = VL of Obinutuzumab
DIVMTQTPLSLPVTPGEPASISCRSSKSLLHSNGITYLYWYLQKPGQSPQLLIYQMSNLVSGVPDRFSGSGSGTDFTLKISRVEAEDVGVYYCAQNLELPYTFGGGTKVEIK

SEQ ID NO: 388 - protein, 122 aa, synthetic construct [sequence omitted]

SEQ ID NO: 389 - protein, 107 aa, synthetic construct [sequence omitted]

SEQ ID NO: 390 - DNA, 357 bp, synthetic construct
  misc_feature 1..357: note = nucleotide sequence coding VH of Cetuximab
  source 1..357: mol_type = other DNA
caagtgcagcttaaacagagtggaccagggctcgttcagccttctcaaagtttgagcataacatgtaccgtaagtggtttttcactgactaactacggagtgcattgggttcgacagtcccctggaaagggtctcgaatggcttggagttatttggagtggcggtaacactgactacaacacaccattcacctctcggctgtctataaacaaggataactctaagtcacaggtctttttcaagatgaacagcctccaaagtaacgacaccgccatctattactgtgcaagagccttgacctactacgattacgagtttgcctattggggtcagggaactctggtaacagtcagtgct

SEQ ID NO: 391 - DNA, 321 bp, synthetic construct
  misc_feature 1..321: note = nucleotide sequence coding VL of Cetuximab
  source 1..321: mol_type = other DNA
gacatccttctcactcagtcccccgtaattctgagcgtgtctcccggcgagcgcgtcagtttctcatgcagggctagccagagtataggtactaacattcattggtatcaacagcgaaccaacggctcaccccgcttgcttatcaaatatgcctctgagagtatctctggcattccatcccgttttagcggtagtggttcaggaacagatttcactctttcaattaactctgtagaatcagaagacatagccgattattattgtcagcaaaacaacaattggcctactacatttggagctggtacaaaactggaactcaag

SEQ ID NO: 392 - DNA, 357 bp, synthetic construct
  misc_feature 1..357: note = nucleotide sequence coding VH of Panitumumab
  source 1..357: mol_type = other DNA
caggtacaactgcaagagagcggacctgggttggtaaagccaagtgagaccctgtcacttacttgcacagtatcaggaggaagtgtctcaagtggcgattactattggacttggattcgacaaagccccggaaaaggattggaatggatcggccacatatattattcaggaaataccaactataatcccagtcttaaatctcggcttaccattagcattgacacttccaaaacccaattttcacttaaactgagttctgtgactgctgccgacactgctatatactactgcgtccgcgaccgggtcactggggcttttgatatatggggacaaggaactatggttactgtatcatct

SEQ ID NO: 393 - DNA, 321 bp, synthetic construct
  misc_feature 1..321: note = nucleotide sequence coding VL of Panitumumab
  source 1..321: mol_type = other DNA
gatattcaaatgacccaatctccttcatcactctcagcatcagtgggggatagagtgacaataacttgccaagcaagccaggatatatctaattatctcaactggtatcaacaaaagccaggtaaagctccaaagttgttgatttacgatgcctctaatctcgagaccggcgtaccaagtaggttcagtggttcaggaagtgggactgatttcacttttaccatttcttctctccagcccgaagacatagcaacttatttctgtcaacacttcgatcatcttcctttggcatttggtggcggcactaaagttgaaatcaag

SEQ ID NO: 394 - DNA, 363 bp, synthetic construct
  misc_feature 1..363: note = nucleotide sequence coding VH of Necitumumab
  source 1..363: mol_type = other DNA
caggtacaactccaggaatccggtcctggtctcgtaaagccaagccaaacattgagtttgacctgcacagtcagtggtggcagtatttcctcaggcgattattactggagttggatacgccagccacccggtaagggattggaatggatcggttatatatactactctggatctacagactataatccttccctgaagtccagggttaccatgagtgttgacacatccaaaaaccagttctccttgaaggtcaactctgtgaccgctgccgatactgccgtttattattgtgcacgtgtatctatcttcggagtaggcacctttgactattggggtcaaggcaccctggtcaccgtgtcatct

SEQ ID NO: 395 - DNA, 321 bp, synthetic construct
  misc_feature 1..321: note = nucleotide sequence coding VL of Necitumumab
  source 1..321: mol_type = other DNA
gagatagtaatgacacagtcacctgctaccctttccctcagccctggcgaacgcgccaccttgtcttgcagggctagccaaagtgtatcctcttatttggcatggtatcagcagaaaccagggcaagccccacggctcctgatttatgatgcctccaatcgagccaccgggattcctgcccgattcagcggatcaggcagtgggactgattttacattgaccattagctctctggagcctgaggactttgccgtgtattattgtcatcaatatgggagtactcccctcacatttggcggcgggacaaaagcagaaattaaa

SEQ ID NO: 396 - DNA, 360 bp, synthetic construct
  misc_feature 1..360: note = nucleotide sequence coding VH of Imgatuzumab
  source 1..360: mol_type = other DNA
caagtacagttggtacaaagtggggccgaggtcaagaaacctggttctagcgtaaaggttagctgcaaggcaagcggcttcaccttcaccgattacaaaattcattgggtccgtcaagcccccggtcaggggcttgaatggatgggttatttcaaccccaactctggttattctacctatgcacagaagttccagggccgcgtcactataactgcagacaagtccacaagtacagcctatatggaactgtccagtttgcgtagcgaggatactgccgtatattactgtgctagactctcacccggcggatattacgttatggatgcatggggccagggcaccaccgtgaccgtgagcagc

SEQ ID NO: 397 - DNA, 318 bp, synthetic construct
  misc_feature 1..318: note = nucleotide sequence coding VL of Imgatuzumab
  source 1..318: mol_type = other DNA
gacatccaaatgacacagtctccttcctcactctccgcttctgtaggagatagagtgacaataacatgccgtgcttcacaaggtatcaataactacctcaattggtatcaacagaaacctggtaaagctccaaagcgccttatctataataccaacaatctccagactggtgttccaagtaggttctccgggagcggtagtgggactgagtttacattgacaatttcatcattgcaacccgaagattttgccacctactattgcttgcagcataatagttttcccactttcggtcagggaactaagctcgaaataaaa

SEQ ID NO: 398 - DNA, 348 bp, synthetic construct
  misc_feature 1..348: note = nucleotide sequence coding VH of Depatuxizumab
  source 1..348: mol_type = other DNA
caggtacaactccaagaatctggacctgggctggtaaaaccatctcagaccttgagtctcacttgcactgtgtccggttactctatatctagcgattttgcatggaattggattcgccagccacccggtaagggactggagtggatgggttacatttcatacagtggaaacacacgttaccaacccagtctcaagagccggataaccattagtagggacacaagcaaaaaccaatttttcctcaaactgaattcagtgactgctgccgacacagccacttactattgtgtcacagccggtcgggggttcccttactggggacagggtactctcgttactgtaagttct

SEQ ID NO: 399 - DNA, 321 bp, synthetic construct
  misc_feature 1..321: note = nucleotide sequence coding VL of Depatuxizumab
  source 1..321: mol_type = other DNA
gacatacaaatgactcaatcacctagctccatgtctgtttccgttggcgaccgcgtaaccatcacctgtcattcctcacaggatataaattccaatattgggtggcttcagcagaaaccaggtaaatcattcaagggccttatttatcacgggaccaaccttgatgacggtgtcccctctcgctttagcggttctggatcaggtacagattataccctgaccatctcttctctccagcccgaggatttcgctacttactactgtgtgcaatacgcacagttcccctggacattcggcggtggaactaaactggagataaag

SEQ ID NO: 400 - DNA, 348 bp, synthetic construct
  misc_feature 1..348: note = nucleotide sequence coding VH of Losatuxizumab
  source 1..348: mol_type = other DNA
gaagttcagttgcaagaaagtggccccggacttgttaaaccatcccagaccttgagcctgacttgcaccgtttctggctattctatttcccgggacttcgcatggaactggatacgccaacctcccggcaagggcttggagtggatggggtatatctcctataacggcaatacacgctatcaacctagtttgaagagccgcataaccatcagtagagacacaagtaaaaaccaattcttcttgaaactgaatagtgtgaccgctgcagacactgcaacctattactgcgtcacagccagtcgggggtttccatattggggtcaaggtacacttgtaaccgtgtcttca

SEQ ID NO: 401 - DNA, 321 bp, synthetic construct
  misc_feature 1..321: note = nucleotide sequence coding VL of Losatuxizumab
  source 1..321: mol_type = other DNA
gatatacaaatgacccagtccccttcctccatgtctgtcagcgtcggtgatagggttaccataacttgtcatagcagccaagacataaacagcaatataggttggctgcaacaaaagcccggtaaatctttcaaggggttgatttaccacggaactaacctcgatgatggtgtgcccagtcgcttttcaggtagtgggtctggaacagactacaccctgacaatctccagtttgcaaccagaagactttgctacttattattgtgtacagtacgctcaatttccttggactttcgggggaggaaccaaacttgagatcaag

SEQ ID NO: 402 - DNA, 372 bp, synthetic construct
  misc_feature 1..372: note = nucleotide sequence coding VH of Etevritamab
  source 1..372: mol_type = other DNA
caagtccaactcgtggagtctggaggcggtgtggtccaaagcgggagatccttgcggctgtcttgcgcagcatcagggtttacatttaggaactacggcatgcactgggttagacaggcacccggtaagtgtcttgaatgggtagcagtaatctggtatgatggtagcgataaatactatgctgatagcgttcgtggtcggttcaccattagtcgggacaactcaaagaacactttgtacctgcaaatgaactctctgagggccgaggatacagctgtatattactgtgctagggatggctatgacatactcaccggcaacccacgggatttcgattactgggggcaagggacattggtaacagtttcatct

SEQ ID NO: 403 - DNA, 336 bp, synthetic construct
  misc_feature 1..336: note = nucleotide sequence coding VL of Etevritamab
  source 1..336: mol_type = other DNA
gatacagtaatgacccagactcctctgagtagtcatgttacactgggccagcctgcctctatctcctgtcgttcaagtcagagtctggtgcactcagacggaaacacctacctttcatggttgcaacagcgtcctggtcaacctcctcgattgttgatatacagaattagtcggcgtttttctggcgtcccagatcgcttctccggctcaggtgccggaacagacttcacccttgagatcagtcgagtggaggctgaggatgtgggcgtatattactgtatgcaaagcactcacgtgccaaggacattcgggtgtggaaccaaggtagagatcaaa

SEQ ID NO: 404 - DNA, 360 bp, synthetic construct
  misc_feature 1..360: note = nucleotide sequence coding VH of AMG-595
  source 1..360: mol_type = other DNA
caggtgcagttggttgagagcggcggaggtgtggtacagcctggaaggagtctgcgactctcatgtgccgcctccggttttacattttcttcctacggcatgcattgggttcgacaagcaccaggcaagggattggaatgggtggcagtaatttggtacgacgggtcaaataaatactatgttgacagcgtgaaagggcgattcactatcagtcgtgacaatagtaaaaacactttgtatctgcaaatgaatagtctgagggcagaggacacagcagtctattactgtgctcgtgatggttggcaacagcttgccccttttgactattggggacaaggaactttggtaacagtaagcagc

SEQ ID NO: 405 - DNA, 336 bp, synthetic construct
  misc_feature 1..336: note = nucleotide sequence coding VL of AMG-595
  source 1..336: mol_type = other DNA
gacattgttatgacacaaacacctttgtcctcacccgtaacactgggccaacctgcctccatatcctgccgaagcagtcaatcacttgtccactctgatgggaatacctacttgtcatggctgcatcagcgaccaggtcagcctccaaggcttctcatatataaaatatccaatcgtttttcaggtgttcccgaccgtttctccgggtcaggggccggaaccgccttcactctcaaaatatccagagtggaggctgaagacgtaggtgtatattattgtatgcaagccacccagttgccacgcacctttgggcaagggactaaagtagaaataaag

SEQ ID NO: 406 - DNA, 354 bp, synthetic construct
  misc_feature 1..354: note = nucleotide sequence coding VH of Atezolizumab
  source 1..354: mol_type = other DNA
gaagttcaactggtggagtctggagggggtctcgtccagcccggcgggagcttgagactgtcttgtgctgcatccggctttacctttagcgattcctggatacactgggtaagacaagcacctggtaaagggttggaatgggtggcatggatttccccatacgggggatcaacctattatgctgatagcgtgaagggccggtttactatttcagccgacacaagcaagaacaccgcctacctccaaatgaattctctgagggccgaggacacagcagtctattactgtgctaggaggcattggcccggcggattcgactactgggggcagggcactctggtcacagtaagctca

SEQ ID NO: 407 - DNA, 321 bp, synthetic construct
  misc_feature 1..321: note = nucleotide sequence coding VL of Atezolizumab
  source 1..321: mol_type = other DNA
gacatccaaatgacacagtctccaagctctctctccgcaagcgtgggcgaccgggtcacaataacatgccgcgcctcacaagacgtgtctacagccgttgcttggtatcagcaaaagcccggaaaagctcccaaactgctcatttattcagccagctttctctacagcggggtgccaagccggttcagtgggagcggaagtggcaccgactttactcttaccatctcctctctgcaacccgaagacttcgccacctattactgccagcaatacctgtatcatccagctactttcgggcaagggaccaaggttgaaatcaaa

SEQ ID NO: 408 - DNA, 360 bp, synthetic construct
  misc_feature 1..360: note = nucleotide sequence coding VH of Avelumab
  source 1..360: mol_type = other DNA
gaggttcagcttctggagtcaggaggtggtcttgttcaacccggagggtctctccgtttgtcctgcgccgcaagtgggttcacattttccagttatatcatgatgtgggtgaggcaagcccctgggaaaggattggagtgggtctcatctatttatccatctggaggtattacattctatgccgacacagttaagggcaggtttactataagccgcgataattccaaaaacaccctgtacctgcaaatgaattcactgcgagccgaggacactgctgtctactattgcgccagaatcaaactggggacagtaacaactgtagactattgggggcaggggactttggtcactgtatcatca

SEQ ID NO: 409 - DNA, 330 bp, synthetic construct
  misc_feature 1..330: note = nucleotide sequence coding VL of Avelumab
  source 1..330: mol_type = other DNA
cagtcagctctgacacagcccgcatctgtctctgggagtcccggacagtcaataactatatcatgcacagggacctcctctgatgttgggggatacaattacgtgtcctggtatcagcagcaccccggcaaggcccccaaactcatgatatacgacgtttcaaatcgtccttcaggcgtgtctaacagattttccggttctaaatcaggcaataccgcttccttgactatctcaggacttcaagcagaggatgaagcagactattactgctcaagctatacctccagttctactagagtgttcggtacaggaactaaggtaacagtgctg

SEQ ID NO: 410 - DNA, 363 bp, synthetic construct
  misc_feature 1..363: note = nucleotide sequence coding VH of Durvalumab
  source 1..363: mol_type = other DNA
gaggttcagctcgtggagagtgggggcggacttgttcagccaggcggttcattgcggttgtcttgtgccgcctcaggatttacattctcaagatactggatgagctgggtgaggcaagcacccggtaaaggtctcgagtgggtagctaatatcaaacaagatgggagcgagaagtattatgttgacagcgtgaagggtcgctttaccatatcaagggataacgctaagaactccctttatcttcagatgaatagtctccgcgctgaggacaccgcagtatattactgtgctagggaaggagggtggtttggggaattggcattcgattactggggtcagggtactctcgttacagtcagttcc

SEQ ID NO: 411 - DNA, 324 bp, synthetic construct
  misc_feature 1..324: note = nucleotide sequence coding VL of Durvalumab
  source 1..324: mol_type = other DNA
gaaatcgttttgacacagagccctgggacactgtccttgagcccaggagaacgcgcaaccctctcctgccgtgcaagtcagcgtgtttcctcatcttaccttgcttggtatcaacaaaagccagggcaggctcctagactgcttatctatgacgcttctagcagagctactgggataccagataggttttccgggtctggttcaggcacagacttcaccctcaccatatctcgactcgaacctgaggattttgcagtgtactattgtcaacaatacggtagtttgccttggacctttggacagggcactaaggtcgagattaaa

SEQ ID NO: 412 - DNA, 360 bp, synthetic construct
  misc_feature 1..360: note = nucleotide sequence coding VH of Trastuzumab
  source 1..360: mol_type = other DNA
gaagtgcagctggtcgaaagtggcggtggacttgtgcaacctggcggtagcctccgtctcagctgcgctgcaagtgggttcaacatcaaggacacttatattcattgggtccgacaggcacctgggaaaggtttggagtgggtcgcacggatctatcccactaatggttacacaagatatgccgattcagtaaaaggccggtttacaatcagcgcagatacttcaaaaaacactgcctatcttcaaatgaactcacttcgagcagaagacacagccgtctattattgtagtcgttggggaggcgacggcttttatgctatggactactggggacaaggaactctggtcacagtttcatca

SEQ ID NO: 413 - DNA, 321 bp, synthetic construct
  misc_feature 1..321: note = nucleotide sequence coding VL of Trastuzumab
  source 1..321: mol_type = other DNA
gatattcagatgactcagagtcctagttccctcagcgcctccgtaggcgacagagttacaataacttgccgagcaagccaagacgtaaacactgcagtcgcctggtaccaacagaaaccaggcaaagctccaaaactcttgatttacagtgcttccttcctttatagtggcgttccaagccgcttcagcggcagccgctctggcaccgacttcactctcactatttcttccttgcaacctgaagacttcgccacttattattgccagcaacactacacaacacccccaacattcggacagggcacaaaggtagaaataaaa

SEQ ID NO: 414 - DNA, 357 bp, synthetic construct
  misc_feature 1..357: note = nucleotide sequence coding VH of Pertuzumab
  source 1..357: mol_type = other DNA
gaagtgcaactggtggagtctggtggtggattggtgcagccaggcggttctctgcgacttagttgtgcagcctccggctttaccttcactgattatacaatggactgggttcggcaggcacccggtaaggggcttgagtgggtcgccgacgtcaatcctaattcagggggaagtatttataaccaaaggttcaagggtcgatttacattgtccgtagatcgtagtaaaaataccctctaccttcaaatgaactccctgagggcagaggataccgcagtctactactgcgctcgtaacctggggcctagtttttatttcgattattggggccaaggcacattggtaactgtgtcttca

SEQ ID NO: 415 - DNA, 321 bp, synthetic construct
  misc_feature 1..321: note = nucleotide sequence coding VL of Pertuzumab
  source 1..321: mol_type = other DNA
gatatacaaatgacacaatctcctagttcattgagtgcctcagtcggcgaccgagtcactataacttgtaaagcaagccaagatgttagcattggcgtagcttggtatcagcagaaacctggaaaagcaccaaaactgcttatctactccgctagttaccgttacaccggagttccctcaaggttttctggcagcggaagtgggactgacttcactctgactatttcttcacttcagccagaagacttcgctacttattactgtcagcagtactatatctatccctatacatttggacaaggaaccaaagttgagattaaa

SEQ ID NO: 416 - DNA, 357 bp, synthetic construct
  misc_feature 1..357: note = nucleotide sequence coding VH of Onartuzumab
  source 1..357: mol_type = other DNA
gaagtccaactggtagaatctggagggggtcttgttcaacctgggggcagtctcaggctgtcatgtgcagcaagtggatatacatttacttcctattggctccattgggtacgacaagcacctgggaaagggctggaatgggttggtatgatcgacccatcaaactctgacacccgctttaatccaaattttaaagaccgctttacaatatccgcagatacaagtaagaacaccgcatatctccagatgaacagcctgcgtgcagaggataccgcagtgtactactgtgcaacctaccggtcctatgtaacccctctcgactattggggtcaaggcacacttgtcaccgtgagtagc

SEQ ID NO: 417 - DNA, 339 bp, synthetic construct
  misc_feature 1..339: note = nucleotide sequence coding VL of Onartuzumab
  source 1..339: mol_type = other DNA
gacatacaaatgacccaatcaccaagttccctttctgcttcagtcggtgatcgcgtgacaataacatgcaaatcatctcaaagtctcttgtacacaagcagccaaaaaaattatcttgcttggtaccagcagaagccagggaaagcaccaaaactgctgatctactgggcttcaacaagagaatccggggtgcccagccgcttttccggttccggcagtggaactgatttcaccctcactatttcctcattgcaacccgaggacttcgcaacctattactgtcaacagtattacgcctacccttggacatttggacaaggaactaaggttgaaattaaa

SEQ ID NO: 418 - DNA, 345 bp, synthetic construct
  misc_feature 1..345: note = nucleotide sequence coding VH of Emibetuzumab
  source 1..345: mol_type = other DNA
caagtacagctcgtccaatccggcgctgaagtcaagaagcccggagcttccgttaaagtttcctgcaaagccagcggctacactttcactgattactatatgcactgggttagacaagcacccgggcagggtctcgaatggatgggtagggttaatccaaatcgcaggggaactacttacaaccagaaatttgagggcagggttaccatgactaccgataccagcacatctactgcatatatggagctgcgttctctgaggagtgatgatacagcagtgtactattgtgcccgcgctaactggttggactactgggggcaaggtacaactgtcacagtatctagc

SEQ ID NO: 419 - DNA, 324 bp, synthetic construct
  misc_feature 1..324: note = nucleotide sequence coding VL of Emibetuzumab
  source 1..324: mol_type = other DNA
gacattcaaatgacacaaagtccatcctctctcagtgcttcagtgggggaccgagtaaccataacatgcagtgtctcaagtagcgtgagtagcatctacctccattggtatcagcagaaacctggcaaggcacccaaactcctcatttattccacaagtaatcttgcttccggcgtaccttctaggtttagcgggtccggctctggcaccgatttcaccctcactattagctccttgcaacctgaggactttgctacttactattgtcaggtttattccggttaccccctcacattcggtggaggaaccaaggtagagattaag

SEQ ID NO: 420 - DNA, 354 bp, synthetic construct
  misc_feature 1..354: note = nucleotide sequence coding VH of Telisotuzumab
  source 1..354: mol_type = other DNA
caggtccagttggtacagtcaggggcagaagttaagaaaccaggcgcttctgtaaaggttagttgcaaggcaagcgggtatatattcacagcctataccatgcattgggtgcgtcaagctcctgggcaaggattggagtggatgggctggatcaagcccaacaatggtctggccaactacgcacagaagttccaaggtcgtgtaaccatgaccagggacacttcaataagcaccgcctacatggaattgagcagacttcgatcagatgatacagcagtttactattgcgctaggagtgaaattaccacagagtttgattactggggccaaggaactctggtgactgtttccagt

SEQ ID NO: 421 - DNA, 333 bp, synthetic construct
  misc_feature 1..333: note = nucleotide sequence coding VL of Telisotuzumab
  source 1..333: mol_type = other DNA
gatatcgttatgacacagtcccccgacagcctggctgtcagtctcggggagagagcaactataaactgtaaaagcagtgaatccgtcgattcatacgcaaacagttttctgcattggtatcagcaaaaacccggccagccacccaaactgctcatatatcgggctagtacacgtgagtcaggcgtaccagaccgctttagcggatcaggaagtgggacagactttaccttgaccattagctcacttcaggctgaggacgttgcagtttactactgccaacaaagtaaggaagacccactcacattcggcggaggaactaaggtcgagattaag

SEQ ID NO: 422 - DNA, 363 bp, synthetic construct
  misc_feature 1..363: note = nucleotide sequence coding VH of Datopotamab
  source 1..363: mol_type = other DNA
caggtgcagttggtccagtccggtgcagaggtaaagaaaccaggcgcttccgttaaagtatcctgtaaagctagcggttatactttcactactgccggaatgcagtgggtgcgacaggctcctggtcagggtctcgaatggatgggatggatcaatactcactcaggagtgccaaagtatgctgaagatttcaaggggcgtgttactatctccgctgacacatccacatctactgcttatcttcagctctctagcctgaagtcagaagatactgctgtttattattgtgcaaggagcgggtttggaagttcctattggtacttcgacgtttggggacaaggaacactggtcactgtttccagc

SEQ ID NO: 423 - DNA, 321 bp, synthetic construct
  misc_feature 1..321: note = nucleotide sequence coding VL of Datopotamab
  source 1..321: mol_type = other DNA
gatatacagatgacccaatcaccctcttctttgagtgcatcagtaggtgatcgtgttacaattacctgtaaagctagtcaagacgtgtctactgctgtcgcctggtatcaacagaaaccaggcaaagcaccaaaacttttgatttattctgcttcttatagatatacaggcgtccccagccggttttcaggttccggttccgggaccgactttaccctcactatcagctctcttcagcctgaggacttcgccgtttattattgccagcagcactatatcaccccactgacttttgggcaagggactaagctggagatcaaa

SEQ ID NO: 424 - DNA, 363 bp, synthetic construct
  misc_feature 1..363: note = nucleotide sequence coding VH of Sacituzumab
  source 1..363: mol_type = other DNA
caagtacagcttcagcaatcaggctctgaactcaagaaacctggtgccagcgtgaaagtatcctgtaaggcatccgggtacacttttacaaactatggaatgaattgggtaaaacaagcccccggacaagggcttaaatggatgggttggataaatacttacaccggagaacctacatatacagacgactttaaagggcgattcgctttctcccttgacacaagtgtaagcacagcctacctgcaaatcagcagtctcaaagccgacgatacagccgtgtacttttgcgccaggggtggcttcggctccagctattggtacttcgatgtctggggacagggcagccttgtaactgtatctagt

SEQ ID NO: 425 - DNA, 321 bp, synthetic construct
  misc_feature 1..321: note = nucleotide sequence coding VL of Sacituzumab
  source 1..321: mol_type = other DNA
gatattcagttgacacagagccctagctcactttcagcctctgtgggtgatagggttagtattacctgtaaggcatcccaagacgttagcattgccgtcgcctggtaccagcagaaacccggaaaagctccaaaactgctcatctactcagcatcctatcgttatacaggtgtacctgacaggttctctggctccgggagcggtaccgattttactttgaccatttcaagtttgcaaccagaagacttcgctgtttactactgccagcagcattacattactccactcacattcggagcagggacaaaggtcgaaatcaaa

SEQ ID NO: 426 - DNA, 354 bp, synthetic construct
  misc_feature 1..354: note = nucleotide sequence coding VH of Rovalpituzumab
  source 1..354: mol_type = other DNA
caagtccagcttgttcaaagtggggctgaagtgaagaaaccaggggctagtgttaaagtgagctgtaaggcatcaggatacactttcacaaactacggaatgaattgggttcgccaagcacctggtcaaggcttggaatggatgggttggattaacacatatacaggtgagccaacttacgccgatgatttcaaggggcgagttaccatgactaccgacacctcaacatccactgcatacatggagcttcgctcactccgaagcgatgatactgcagtttactattgcgctcgcatcggtgactcatcacctagcgactactggggccaaggtacattggtaacagtttcttca

SEQ ID NO: 427 - DNA, 321 bp, synthetic construct
  misc_feature 1..321: note = nucleotide sequence coding VL of Rovalpituzumab
  source 1..321: mol_type = other DNA
gagatcgtgatgacccagagtcccgctactctctcagtgagtcctggtgaacgtgctacactgtcttgtaaggccagtcagtccgtctcaaacgatgtcgtttggtatcagcaaaagccaggacaagcccccagactcctgatatactacgccagtaatcgctatactggaatccccgctagattcagtgggagtggaagcggaactgaatttaccttgactatatcctcattgcaaagcgaagactttgccgtttactattgtcaacaagactacacctctccttggaccttcggacaaggtacaaaacttgaaatcaag

SEQ ID NO: 428 - DNA, 354 bp, synthetic construct
  misc_feature 1..354: note = nucleotide sequence coding VH of Tarlatamab
  source 1..354: mol_type = other DNA
caagtacagctccaagaaagtggccccggattggtgaagccatccgaaacactttcccttacctgcactgtctccgggggctccatcagtagttattactggagttggatacgccaaccacccggtaagtgtctggagtggataggttatgtgtattactcaggcacaaccaattataatccatccttgaaaagccgggtaaccatctcagtagataccagcaaaaaccagttctccctgaaactgtccagtgttactgctgctgataccgccgtatattattgtgcatccattgcagtgacagggttttattttgactattggggccagggtactttggtaaccgtatcttca

SEQ ID NO: 429 - DNA, 324 bp, synthetic construct
  misc_feature 1..324: note = nucleotide sequence coding VL of Tarlatamab
  source 1..324: mol_type = other DNA
gagatcgtcctgacccaaagcccaggtactctttccctcagcccaggcgaaagggtcactctgtcatgcagggctagtcaaagagtcaacaataattacctcgcatggtatcaacaaagacccggacaggctccacgcctgctcatatatggagcaagtagccgagctactggcattcccgatagattcagtggatctggatctgggaccgattttactctgacaataagtcgtcttgaacctgaagattttgcagtatactattgtcagcaatatgacaggagccccctgacattcgggtgcggtactaagctggaaatcaaa

SEQ ID NO: 430 - DNA, 363 bp, synthetic construct
  misc_feature 1..363: note = nucleotide sequence coding VH of Belantamab
  source 1..363: mol_type = other DNA
caagtccaactggtccagtcaggcgcagaagttaaaaagcctggcagcagtgtgaaggtgtcttgtaaggcaagcggcggtacatttagtaattattggatgcactgggtacggcaggctcccggccaagggcttgaatggatgggcgccacataccgaggtcattcagacacctattacaaccagaaattcaaggggcgcgtgaccattacagcagataaatcaacttctacagcctacatggaactcagctccctccggtcagaggatacagcagtctactactgtgctcgcggagccatttacgatgggtatgatgtgctggataattgggggcagggcacactcgtgaccgtaagtagt

SEQ ID NO: 431 - DNA, 321 bp, synthetic construct
  misc_feature 1..321: note = nucleotide sequence coding VL of Belantamab
  source 1..321: mol_type = other DNA
gatatacagatgacccagtcaccatccagccttagtgcatccgtcggggatcgggtgactattacttgctccgcttctcaagatatttcaaactatctgaattggtatcagcaaaagcctgggaaggccccaaaattgctgatctattacacttcaaatttgcactcaggggttccctctcgcttcagcggaagcggaagcggtactgattttaccttgactatctctagcctccagccagaggactttgctacctactactgccaacagtacaggaaactcccatggacttttggacaaggcaccaagctcgaaattaag

SEQ ID NO: 432 - DNA, 360 bp, synthetic construct
  misc_feature 1..360: note = nucleotide sequence coding VH of Ladiratuzumab
  source 1..360: mol_type = other DNA
caagttcagttggttcaatctggggccgaagtcaaaaaacctggcgcttcagttaaagttagctgcaaagcaagcggtctcactatagaagactattatatgcactgggtcagacaggctccagggcaagggcttgagtggatggggtggatagatccagagaatggggacaccgagtatggacccaaattccaggggcgtgtaaccatgacccgagacacttcaataaatactgcatacatggaactctcccggctccggagcgacgatacagccgtgtattactgtgctgtccacaacgcccactacggcacatggtttgcatattgggggcagggaactcttgttactgtttcttca

SEQ ID NO: 433 - DNA, 336 bp, synthetic construct
  misc_feature 1..336: note = nucleotide sequence coding VL of Ladiratuzumab
  source 1..336: mol_type = other DNA
gacgtagtgatgactcagtctccactgtccctgccagtgacattgggccaacctgcaagtatttcatgcagatcaagtcaatctctcctgcacagtagcggcaacacatacttggagtggtatcaacaacgcccaggtcaatcacccaggccactgatatataaaatctcaactcgattcagcggtgttcccgacaggttctcaggatctggctccggcactgattttaccttgaagatctcacgagtggaagctgaggatgtgggagtatattactgtttccaaggttcacatgtcccttatacttttggtggaggaactaaggtagagatcaag

SEQ ID NO: 434 - DNA, 345 bp, synthetic construct
  misc_feature 1..345: note = nucleotide sequence coding VH of Codrituzumab
  source 1..345: mol_type = other DNA
caggtgcaactcgttcaaagcggggccgaggtgaagaaaccaggggcctcagttaaggtgagttgcaaggcaagtggatacactttcaccgattatgaaatgcattgggtgcgtcaggccccaggacaaggactggagtggatgggcgctctcgatcctaagactggtgatactgcttactctcaaaagttcaaaggccgagtcaccttgaccgccgacaagtccacatccactgcatatatggaattgtcaagtctgacaagcgaagatacagccgtctactactgcacccgcttttatagctatacatattggggacaggggaccttggttactgtgtcatct

SEQ ID NO: 435 - DNA, 336 bp, synthetic construct
  misc_feature 1..336: note = nucleotide sequence coding VL of Codrituzumab
  source 1..336: mol_type = other DNA
gacgtggtaatgacacaatcacctttgtctcttcccgtaacccccggtgaaccagccagcatctcatgcagaagcagtcagtcactggtacattccaaccgtaatacttatcttcactggtacttgcagaagcctgggcagtctcctcaacttttgatatataaagtgagcaatcggtttagcggtgtcccagaccgcttttctggatctggaagtggaacagactttactctgaaaataagcagagtcgaggcagaagatgtcggagtttactactgtagccagaacacacacgtacccccaacctttggacagggcacaaagttggaaatcaag

SEQ ID NO: 436 - DNA, 366 bp, synthetic construct
  misc_feature 1..366: note = nucleotide sequence coding VH of Aprutumab
  source 1..366: mol_type = other DNA
gaggtacaactgcttgaatctggaggagggttggtacaacctggtggttcactgcgattgtcctgtgcagcctcaggctttactttctcatcatatgccatgtcctgggtaaggcaggcacctggaaaaggactcgaatgggtctcagccatctccggttcaggcacatcaacttactatgcagactctgtcaaagggcgctttacaatatctagggataattcaaaaaatacattgtacttgcagatgaacagtttgcgtgccgaagataccgcagtgtactattgcgctagggttcgatataactggaaccatggtgactggtttgacccttggggccaaggcacactggtgacagtgagttcc

SEQ ID NO: 437 - DNA, 330 bp, synthetic construct
  misc_feature 1..330: note = nucleotide sequence coding VL of Aprutumab
  source 1..330: mol_type = other DNA
cagtccgtcctcacacaaccacctagtgcctctggtacaccaggacaacgtgtcacaatttcctgcagcgggtcaagttcaaacatagggaataactatgtgtcatggtatcaacaacttcctggtactgctccaaagctcctcatttatgaaaactataacaggcccgcaggtgtcccagatcgattttcaggatcaaagtccggtacctcagccagtttggcaattagtggccttcgatccgaagatgaagcagattactactgttcatcctgggacgattctcttaactattgggtattcggcggaggcactaaactcaccgtcctt

SEQ ID NO: 438 - DNA, 342 bp, synthetic construct
  misc_feature 1..342: note = nucleotide sequence coding VH of Bemarituzumab
  source 1..342: mol_type = other DNA
caagtgcagcttgttcagagtggggctgaagtcaaaaagccaggctcaagcgtgaaagtcagctgcaaggccagcggttacatcttcacaacttacaatgttcactgggtcagacaagcccctggtcaggggcttgagtggataggatcaatctaccccgataatggggacaccagctataatcaaaacttcaaaggacgtgcaacaatcacagccgacaagtcaacttcaacagcctacatggagctttccagcttgcgatccgaagatactgccgtatattactgtgctagaggcgacttcgcttattggggacaaggtactttggtgactgtttcttct

SEQ ID NO: 439 - DNA, 321 bp, synthetic construct
  misc_feature 1..321: note = nucleotide sequence coding VL of Bemarituzumab
  source 1..321: mol_type = other DNA
gacattcaaatgacccaatcccccagttccttgagtgcctccgtcggagatcgagttactattacatgtaaagctagtcaaggggtcagtaacgacgttgcttggtaccagcagaagccaggtaaggctcccaagctcctgatatatagcgcctcataccgctacacaggtgtgccttcccggtttagtggctcaggatcagggacagattttacattcactataagctctttgcagcccgaagacatagccacatattattgccagcagcattccactactccatacacatttggacagggaacaaagctggagattaag

SEQ ID NO: 440 - DNA, 381 bp, synthetic construct
  misc_feature 1..381: note = nucleotide sequence coding VH of Vofatamab
  source 1..381: mol_type = other DNA
gaagtacagcttgtcgagagcggtggcgggcttgtacaacctggtggaagcttgcggttgagttgtgcagccagcggtttcacatttactagcactggaatatcatgggtccgtcaagctccagggaaagggctggaatgggttggccgaatatatcccaccagtggctctaccaactacgcagactcagtcaagggtcgctttacaatttctgctgacacaagtaagaacaccgcatatttgcagatgaactcactgcgagccgaggataccgccgtttactactgtgcaaggacatacggaatttacgatctttacgttgattatacagagtatgtgatggattattgggggcagggcaccctcgtcactgtcagttct

SEQ ID NO: 441 - DNA, 321 bp, synthetic construct
  misc_feature 1..321: note = nucleotide sequence coding VL of Vofatamab
  source 1..321: mol_type = other DNA
gacatccagatgacccagagcccctcttctttgtcagcaagcgtcggagaccgcgttaccattacttgccgtgcctctcaggacgtggacaccagccttgcttggtacaagcagaaaccaggaaaagcccccaagctgctcatctattccgcttcatttctctacagcggagtgccatcccgtttctccggttcaggctctggaacagacttcactctgactataagcagtcttcaacccgaagacttcgctacatactattgtcagcaatcaaccggacacccacagacattcggccagggcactaaagtagagattaaa

SEQ ID NO: 442 - DNA, 348 bp, synthetic construct
  misc_feature 1..348: note = nucleotide sequence coding VH of Ramucirumab
  source 1..348: mol_type = other DNA
gaagttcagcttgtgcagagtggcggagggcttgtgaaaccaggaggatcactgaggctctcctgtgcagcatccggtttcacattcagcagctatagtatgaactgggtgcgtcaggctccagggaagggactggaatgggtctcaagcatttcctcctcctcttcatatatatattacgccgacagtgtaaaaggccgctttacaatatctcgggataacgctaaaaatagcttgtaccttcagatgaattcactgagggctgaggacactgctgtgtactactgtgcaagagtcaccgacgcttttgatatttggggtcaggggacaatggtgaccgtctcctca

SEQ ID NO: 443 - DNA, 321 bp, synthetic construct
  misc_feature 1..321: note = nucleotide sequence coding VL of Ramucirumab
  source 1..321: mol_type = other DNA
gatatacaaatgacccagtctcccagttcagtatccgccagcataggtgaccgcgtgaccataacatgccgggccagccagggaattgataattggttggggtggtatcaacaaaagcccggaaaagctcccaagctccttatctatgatgcttctaacttggatacaggtgtacccagtcgatttagtggctccgggagtgggacttatttcaccctcactatatcttctctgcaagcagaagactttgcagtatatttctgtcaacaggccaaagcattccctccaaccttcggtggggggacaaaggtagacattaaa

SEQ ID NO: 444 - DNA, 363 bp, synthetic construct
  misc_feature 1..363: note = nucleotide sequence coding VH of Rituximab
  source 1..363: mol_type = other DNA
caggtccagctccaacaacctggagcagaattggtcaagccaggggcaagcgtcaagatgagctgcaaggcaagcggctatactttcacctcctacaatatgcattgggtcaaacaaactccaggtcgtgggcttgagtggatcggggccatttacccaggcaacggcgacacctcatataaccaaaagtttaagggaaaagccactttgacagcagataaaagtagtagcactgcatacatgcaactgtcaagtctgactagcgaagatagtgccgtatattattgcgctaggtccacatattacggcggtgattggtacttcaatgtttggggagccgggactacagtcaccgtatccgct

SEQ ID NO: 445 - DNA, 318 bp, synthetic construct
  misc_feature 1..318: note = nucleotide sequence coding VL of Rituximab
  source 1..318: mol_type = other DNA
caaatcgtcctgtctcaatcaccagcaattctgagtgctagtcccggagaaaaagtcactatgacctgtagagcctcatcatctgtttcctatatacattggtttcagcagaaacctggatcttctcccaagccctggatttatgcaacctctaacctcgcaagtggagtccccgtgcggttttcaggcagcggttccggtacaagttattccctgaccatcagccgtgtggaagcagaagacgccgccacatactactgccaacagtggacctcaaatcctcccacctttgggggaggtactaaacttgaaataaaa

SEQ ID NO: 446 - DNA, 357 bp, synthetic construct
  misc_feature 1..357: note = nucleotide sequence coding VH of Obinutuzumab
  source 1..357: mol_type = other DNA
caagtgcaactggttcaaagtggagccgaggtcaaaaaacctggttcctccgtcaaagtgtcttgtaaagcttcagggtacgcattctcctactcctggataaactgggtgcgtcaggctcctgggcaaggtctggaatggatgggccggattttcccaggagatggcgacacagactacaatgggaagtttaagggtcgggtaaccatcaccgctgacaagagtacatctaccgcctatatggagctttcttcacttaggagtgaggacacagcagtctactattgtgctcgaaatgtgtttgacgggtattggctggtgtattggggccagggtaccctcgtaacagtatcatca

SEQ ID NO: 447 - DNA, 336 bp, synthetic construct
  misc_feature 1..336: note = nucleotide sequence coding VL of Obinutuzumab
  source 1..336: mol_type = other DNA
gatattgttatgacacaaacaccactgtccctccctgttacacccggagagcctgcttccataagttgtcgatcctccaaatcacttctccactcaaatggaatcacttatctttattggtatcttcagaagccaggacagtcccctcaactgttgatttatcagatgtcaaatttggtgagtggggtgccagataggttttctggatccggttccggtactgactttacattgaaaatatcccgagtcgaagccgaagacgtgggcgtgtactattgcgctcagaaccttgagctgccttacacctttggcggtgggactaaagtggaaattaag

SEQ ID NO: 448 - DNA, 366 bp, synthetic construct
  misc_feature 1..366: note = nucleotide sequence coding VH of Daratumumab
  source 1..366: mol_type = other DNA
gaggttcagttgctggagagcggaggggggcttgtccaaccaggcggttctctgcgactttcttgtgcagtgtctgggtttaccttcaacagctttgccatgtcctgggtgcgccaagcacccggaaagggactggagtgggttagcgcaatctctgggtcagggggagggacttattatgctgactctgttaagggtagatttacaatcagtcgcgataatagtaaaaatacactgtatcttcagatgaactctctcagagccgaggatacagccgtgtatttctgtgccaaagacaagatcctttggttcggagagcctgttttcgactattggggtcaagggacattggtgacagtaagctct

SEQ ID NO: 449 - DNA, 321 bp, synthetic construct
  misc_feature 1..321: note = nucleotide sequence coding VL of Daratumumab
  source 1..321: mol_type = other DNA
gaaattgttctcacccagagtccagctaccctgtccctgagccccggcgagagagcaaccttgagttgccgagcctctcaatccgtctcctcctatctggcctggtaccaacaaaaaccaggccaagccccccgtttgctgatatacgacgccagtaaccgagctaccggcatacccgcccgctttagcggctctggatctggtacagatttcacactcactatatcaagtctggaacctgaagatttcgcagtctattattgccaacaacggtcaaattggccccctacatttggacaagggaccaaagtggagattaag

SEQ ID NO: 450 - DNA, 384 bp, synthetic construct
  misc_feature 1..384: note = nucleotide sequence coding VH of 1C1
  source 1..384: mol_type = other DNA
gaggtacagttgctggagtcaggaggtggattggtccaacccggaggatctcttcgtctgtcctgcgccgcctcaggatttaccttctctcattatatgatggcatgggtacgtcaggctccaggcaaaggtctggaatgggttagtcggattggtccctcagggggtcctacccattatgccgattctgtaaagggccgttttaccataagcagagacaactctaagaacaccctttaccttcagatgaatagcctgagggctgaggataccgcagtgtattactgcgcaggctatgactctgggtacgactatgtcgccgtagcaggacctgccgagtattttcaacactggggacaggggacccttgtcacagtttctagt

SEQ ID NO: 451 - DNA, 321 bp, synthetic construct
  misc_feature 1..321: note = nucleotide sequence coding VL of 1C1
  source 1..321: mol_type = other DNA
gatattcaaatgacacaaagcccaagttccttgtccgcctcagttggtgatcgtgtgacaataacctgtcgggcttcacaatccatatctacatggctggcttggtaccagcaaaagccaggtaaagccccaaaactcctgatttacaaggcaagtaacttgcatactggggtacccagccgtttctctgggtcaggctctgggacagagtttagtcttacaatttctggtctgcaacccgatgacttcgctacctattactgtcaacaatataatagttattctcgaacatttggtcagggaacaaaagtggaaatcaaa

SEQ ID NO: 452 - DNA, 654 bp, synthetic construct
  misc_feature 1..654: note = nucleotide sequence coding Trastuzumab VH-CH1 domain
  source 1..654: mol_type = other DNA
gaagtgcagctggtcgaaagtggcggtggacttgtgcaacctggcggtagcctccgtctcagctgcgctgcaagtgggttcaacatcaaggacacttatattcattgggtccgacaggcacctgggaaaggtttggagtgggtcgcacggatctatcccactaatggttacacaagatatgccgattcagtaaaaggccggtttacaatcagcgcagatacttcaaaaaacactgcctatcttcaaatgaactcacttcgagcagaagacacagccgtctattattgtagtcgttggggaggcgacggcttttatgctatggactactggggacaaggaactctggtcacagtttcatcagctagcaccaaaggacctagtgtttttcctcttgccccttcctcaaagtctacctctggggggacagccgctctgggctgcctggtcaaggattatttcccagagcctgtcactgtcagttggaactctggagccttgacttctggtgttcatacatttcctgctgtccttcaaagcagcggcttgtactcattgtcttctgttgtgacagtaccctcaagcagcctcggcactcagacatacatctgcaatgtcaaccacaaaccctcaaatacaaaggtagataaaaaagtc

SEQ ID NO: 453 - DNA, 642 bp, synthetic construct
  misc_feature 1..642: note = nucleotide sequence coding Trastuzumab VL-CL domain
  source 1..642: mol_type = other DNA
gatattcagatgactcagagtcctagttccctcagcgcctccgtaggcgacagagttacaataacttgccgagcaagccaagacgtaaacactgcagtcgcctggtaccaacagaaaccaggcaaagctccaaaactcttgatttacagtgcttccttcctttatagtggcgttccaagccgcttcagcggcagccgctctggcaccgacttcactctcactatttcttccttgcaacctgaagacttcgccacttattattgccagcaacactacacaacacccccaacattcggacagggcacaaaggtagaaataaaacgtacggtggcagctcccagcgtttttatctttcccccatccgacgagcagctcaagagtggcactgcctctgtagtttgtttgctgaataacttctatccacgtgaagcaaaagtacagtggaaggtcgataatgcccttcagagcggtaacagccaagaaagtgttaccgagcaagattccaaagattccacttacagtctgtccagcacattgacactgagtaaggctgattacgaaaaacacaaggtgtacgcatgcgaggtgacacaccaaggtctttcatctcctgtaactaagagctttaaccggggagaatgt

SEQ ID NO: 454 - DNA, 651 bp, synthetic construct
  misc_feature 1..651: note = nucleotide sequence coding IgG1 Fc (CH2-CH3)
  source 1..651: mol_type = other DNA
gcacctgaactcctggggggaccgtcagtcttcctcttccccccaaaacccaaggacaccctcatgatctcccggacccctgaggtcacatgcgtggtggtggacgtgagccacgaagaccctgaggtcaagttcaactggtacgtggacggcgtggaggtgcataatgccaagacaaagccgcgggaggagcagtacaacagcacgtaccgtgtggtcagcgtcctcaccgtcctgcaccaggactggctgaatggcaaggagtacaagtgcaaggtctccaacaaagccctcccagcccccatcgagaaaaccatctccaaagccaaagggcagccccgagaaccacaggtgtacaccctgcccccaagccgggaggagatgaccaagaaccaggtcagcctgacgtgcctggtcaaaggcttctatcccagcgacatcgccgtggagtgggagagcaatgggcagccggagaacaactacaagaccacgcctcccgtgctggactccgacggctccttcttcctctacagcaagctcaccgtggacaagagcaggtggcagcaggggaacgtcttctcatgctccgtgatgcatgaggctctgcacaaccactacacgcagaagagcctctccctgtctccgggtaaa

SEQ ID NO: 455 - DNA, 651 bp, synthetic construct
  misc_feature 1..651: note = nucleotide sequence coding IgG1 Fc (Knob; S354C, T366W)
  source 1..651: mol_type = other DNA
gcacctgaactcctggggggaccgtcagtcttcctcttccccccaaaacccaaggacaccctcatgatctcccggacccctgaggtcacatgcgtggtggtggacgtgagccacgaagaccctgaggtcaagttcaactggtacgtggacggcgtggaggtgcataatgccaagacaaagccgcgggaggagcagtacaacagcacgtaccgtgtggtcagcgtcctcaccgtcctgcaccaggactggctgaatggcaaggagtacaagtgcaaggtctccaacaaagccctcccagcccccatcgagaaaaccatctccaaagccaaagggcagccccgagaaccacaggtgtacaccctgcccccatgccgggaggagatgaccaagaaccaggtcagcctgtggtgcctggtcaaaggcttctatcccagcgacatcgccgtggagtgggagagcaatgggcagccggagaacaactacaagaccacgcctcccgtgctggactccgacggctccttcttcctctacagcaagctcaccgtggacaagagcaggtggcagcaggggaacgtcttctcatgctccgtgatgcatgaggctctgcacaaccactacacgcagaagagcctctccctgtctccgggtaaa

SEQ ID NO: 456 - DNA, 651 bp, synthetic construct
  misc_feature 1..651: note = nucleotide sequence coding IgG1 Fc (Hole; Y349C, T366S, L368A,Y407V)
  source 1..651: mol_type = other DNA
gcacctgaactcctggggggaccgtcagtcttcctcttccccccaaaacccaaggacaccctcatgatctcccggacccctgaggtcacatgcgtggtggtggacgtgagccacgaagaccctgaggtcaagttcaactggtacgtggacggcgtggaggtgcataatgccaagacaaagccgcgggaggagcagtacaacagcacgtaccgtgtggtcagcgtcctcaccgtcctgcaccaggactggctgaatggcaaggagtacaagtgcaaggtctccaacaaagccctcccagcccccatcgagaaaaccatctccaaagccaaagggcagccccgagaaccacaggtgtgcaccctgcccccatcccgggaggagatgaccaagaaccaggtcagcctgagctgcgcggtcaaaggcttctatcccagcgacatcgccgtggagtgggagagcaatgggcagccggagaacaactacaagaccacgcctcccgtgctggactccgacggctccttcttcctcgtgagcaagctcaccgtggacaagagcaggtggcagcaggggaacgtcttctcatgctccgtgatgcatgaggctctgcacaaccactacacgcagaagagcctctccctgtctccgggtaaa

SEQ ID NO: 457 - DNA, 45 bp, synthetic construct
  misc_feature 1..45: note = nucleotide sequence coding 15-mer Linker
  source 1..45: mol_type = other DNA
ggtggtgggggcagcgggggcggaggtagtggaggcggcggtagt

SEQ ID NO: 458 - DNA, 681 bp, synthetic construct
  misc_feature 1..681: note = nucleotide sequence coding Fc-Hole
  source 1..681: mol_type = other DNA
gacaaaactcacacatgcccaccgtgcccagcacctgaactcctggggggaccgtcagtcttcctcttccccccaaaacccaaggacaccctcatgatctcccggacccctgaggtcacatgcgtggtggtggacgtgagccacgaagaccctgaggtcaagttcaactggtacgtggacggcgtggaggtgcataatgccaagacaaagccgcgggaggagcagtacaacagcacgtaccgtgtggtcagcgtcctcaccgtcctgcaccaggactggctgaatggcaaggagtacaagtgcaaggtctccaacaaagccctcccagcccccatcgagaaaaccatctccaaagccaaagggcagccccgagaaccacaggtgtgcaccctgcccccatcccgggaggagatgaccaagaaccaggtcagcctgagctgcgcggtcaaaggcttctatcccagcgacatcgccgtggagtgggagagcaatgggcagccggagaacaactacaagaccacgcctcccgtgctggactccgacggctccttcttcctcgtgagcaagctcaccgtggacaagagcaggtggcagcaggggaacgtcttctcatgctccgtgatgcatgaggctctgcacaaccactacacgcagaagagcctctccctgtctccgggtaaa

SEQ ID NO: 459 - DNA, 1350 bp, synthetic construct
  misc_feature 1..1350: note = nucleotide sequence coding TraH-WT-Knob
  source 1..1350: mol_type = other DNA
gaagttcaacttgtggagtctggaggcggtttggtacaacctggaggttcacttcgtttgtcatgtgctgcctctgggtttaatatcaaggatacttatattcattgggttcgccaggcacccggaaaagggctggaatgggtggcccgtatatatcccactaacggttacactcgatatgctgactctgtaaagggtcgatttactatatccgctgatactagcaaaaacactgcctacctccagatgaacagtctgcgcgccgaggatacagcagtttattattgttcccgatggggaggtgacgggttctatgccatggactactggggtcaagggacactggtaaccgtttcttctgctagcaccaaaggacctagtgtttttcctcttgccccttcctcaaagtctacctctggggggacagccgctctgggctgcctggtcaaggattatttcccagagcctgtcactgtcagttggaactctggagccttgacttctggtgttcatacatttcctgctgtccttcaaagcagcggcttgtactcattgtcttctgttgtgacagtaccctcaagcagcctcggcactcagacatacatctgcaatgtcaaccacaaaccctcaaatacaaaggtagataaaaaagtcgaaccaaagtcttgtgacaaaactcacacgtgcccaccgtgcccagcacctgaactcctggggggaccgtcagtcttcctcttccccccaaaacccaaggacaccctcatgatctcccggacccctgaggtcacatgcgtggtggtggacgtgagccacgaagaccctgaggtcaagttcaactggtacgtggacggcgtggaggtgcataatgccaagacaaagccgcgggaggagcagtacaacagcacgtaccgtgtggtcagcgtcctcaccgtcctgcaccaggactggctgaatggcaaggagtacaagtgcaaggtctccaacaaagccctcccagcccccatcgagaaaaccatctccaaagccaaagggcagccccgagaaccacaggtgtacaccctgcccccatgccgggaggagatgaccaagaaccaggtcagcctgtggtgcctggtcaaaggcttctatcccagcgacatcgccgtggagtgggagagcaatgggcagccggagaacaactacaagaccacgcctcccgtgctggactccgacggctccttcttcctctacagcaagctcaccgtggacaagagcaggtggcagcaggggaacgtcttctcatgctccgtgatgcatgaggctctgcacaaccactacacgcagaagagcctctccctgtctccgggtaaa

SEQ ID NO: 460 - DNA, 1383 bp, synthetic construct
  misc_feature 1..1383: note = nucleotide sequence coding TraL-WT-Knob
  source 1..1383: mol_type = other DNA
gacattcagatgacccaatccccctctagcctttcagcctccgtaggggacagagttacaataacctgtagggctagtcaggacgttaatacagcagtcgcatggtaccagcagaagcccggtaaggctcctaagcttttgatctacagtgcttctttcctgtattctggtgtacctagccgattctcaggctctcggagtggcacagacttcactctgacaatttcaagtctccagccagaagattttgcaacctactactgccaacaacactacactactcctccaaccttcggacagggcacaaaagtagagattaagcgtacggtggcagctcccagcgtttttatctttcccccatccgacgagcagctcaagagtggcactgcctctgtagtttgtttgctgaataacttctatccacgtgaagcaaaagtacagtggaaggtcgataatgcccttcagagcggtaacagccaagaaagtgttaccgagcaagattccaaagattccacttacagtctgtccagcacattgacactgagtaaggctgattacgaaaaacacaaggtgtacgcatgcgaggtgacacaccaaggtctttcatctcctgtaactaagagctttaaccggggagaatgtggtggtgggggcagcgggggcggaggtagtggaggcggcggtagtgaaccaaagagtagtgacaaaactcacacgtgcccaccgtgcccagcacctgaactcctggggggaccgtcagtcttcctcttccccccaaaacccaaggacaccctcatgatctcccggacccctgaggtcacatgcgtggtggtggacgtgagccacgaagaccctgaggtcaagttcaactggtacgtggacggcgtggaggtgcataatgccaagacaaagccgcgggaggagcagtacaacagcacgtaccgtgtggtcagcgtcctcaccgtcctgcaccaggactggctgaatggcaaggagtacaagtgcaaggtctccaacaaagccctcccagcccccatcgagaaaaccatctccaaagccaaagggcagccccgagaaccacaggtgtacaccctgcccccatgccgggaggagatgaccaagaaccaggtcagcctgtggtgcctggtcaaaggcttctatcccagcgacatcgccgtggagtgggagagcaatgggcagccggagaacaactacaagaccacgcctcccgtgctggactccgacggctccttcttcctctacagcaagctcaccgtggacaagagcaggtggcagcaggggaacgtcttctcatgctccgtgatgcatgaggctctgcacaaccactacacgcagaagagcctctccctgtctccgggtaaa

SEQ ID NO: 461 - DNA, 1350 bp, synthetic construct
  misc_feature 1..1350: note = nucleotide sequence coding TraH-Q105C-Knob
  source 1..1350: mol_type = other DNA
gaagttcaacttgtggagtctggaggcggtttggtacaacctggaggttcacttcgtttgtcatgtgctgcctctgggtttaatatcaaggatacttatattcattgggttcgccaggcacccggaaaagggctggaatgggtggcccgtatatatcccactaacggttacactcgatatgctgactctgtaaagggtcgatttactatatccgctgatactagcaaaaacactgcctacctccagatgaacagtctgcgcgccgaggatacagcagtttattattgttcccgatggggaggtgacgggttctatgccatggactactggggttgtgggacactggtaaccgtttcttctgctagcaccaaaggacctagtgtttttcctcttgccccttcctcaaagtctacctctggggggacagccgctctgggctgcctggtcaaggattatttcccagagcctgtcactgtcagttggaactctggagccttgacttctggtgttcatacatttcctgctgtccttcaaagcagcggcttgtactcattgtcttctgttgtgacagtaccctcaagcagcctcggcactcagacatacatctgcaatgtcaaccacaaaccctcaaatacaaaggtagataaaaaagtcgaaccaaagtcttgtgacaaaactcacacgtgcccaccgtgcccagcacctgaactcctggggggaccgtcagtcttcctcttccccccaaaacccaaggacaccctcatgatctcccggacccctgaggtcacatgcgtggtggtggacgtgagccacgaagaccctgaggtcaagttcaactggtacgtggacggcgtggaggtgcataatgccaagacaaagccgcgggaggagcagtacaacagcacgtaccgtgtggtcagcgtcctcaccgtcctgcaccaggactggctgaatggcaaggagtacaagtgcaaggtctccaacaaagccctcccagcccccatcgagaaaaccatctccaaagccaaagggcagccccgagaaccacaggtgtacaccctgcccccatgccgggaggagatgaccaagaaccaggtcagcctgtggtgcctggtcaaaggcttctatcccagcgacatcgccgtggagtgggagagcaatgggcagccggagaacaactacaagaccacgcctcccgtgctggactccgacggctccttcttcctctacagcaagctcaccgtggacaagagcaggtggcagcaggggaacgtcttctcatgctccgtgatgcatgaggctctgcacaaccactacacgcagaagagcctctccctgtctccgggtaaa

SEQ ID NO: 462 - DNA, 1383 bp, synthetic construct
  misc_feature 1..1383: note = nucleotide sequence coding TraL-A43C-Knob
  source 1..1383: mol_type = other DNA
gacattcagatgacccaatccccctctagcctttcagcctccgtaggggacagagttacaataacctgtagggctagtcaggacgttaatacagcagtcgcatggtaccagcagaagcccggtaagtgtcctaagcttttgatctacagtgcttctttcctgtattctggtgtacctagccgattctcaggctctcggagtggcacagacttcactctgacaatttcaagtctccagccagaagattttgcaacctactactgccaacaacactacactactcctccaaccttcggacagggcacaaaagtagagattaagcgtacggtggcagctcccagcgtttttatctttcccccatccgacgagcagctcaagagtggcactgcctctgtagtttgtttgctgaataacttctatccacgtgaagcaaaagtacagtggaaggtcgataatgcccttcagagcggtaacagccaagaaagtgttaccgagcaagattccaaagattccacttacagtctgtccagcacattgacactgagtaaggctgattacgaaaaacacaaggtgtacgcatgcgaggtgacacaccaaggtctttcatctcctgtaactaagagctttaaccggggagaatgtggtggtgggggcagcgggggcggaggtagtggaggcggcggtagtgaaccaaagagtagtgacaaaactcacacgtgcccaccgtgcccagcacctgaactcctggggggaccgtcagtcttcctcttccccccaaaacccaaggacaccctcatgatctcccggacccctgaggtcacatgcgtggtggtggacgtgagccacgaagaccctgaggtcaagttcaactggtacgtggacggcgtggaggtgcataatgccaagacaaagccgcgggaggagcagtacaacagcacgtaccgtgtggtcagcgtcctcaccgtcctgcaccaggactggctgaatggcaaggagtacaagtgcaaggtctccaacaaagccctcccagcccccatcgagaaaaccatctccaaagccaaagggcagccccgagaaccacaggtgtacaccctgcccccatgccgggaggagatgaccaagaaccaggtcagcctgtggtgcctggtcaaaggcttctatcccagcgacatcgccgtggagtgggagagcaatgggcagccggagaacaactacaagaccacgcctcccgtgctggactccgacggctccttcttcctctacagcaagctcaccgtggacaagagcaggtggcagcaggggaacgtcttctcatgctccgtgatgcatgaggctctgcacaaccactacacgcagaagagcctctccctgtctccgggtaaa

SEQ ID NO: 463 - DNA, 1350 bp, synthetic construct
  misc_feature 1..1350: note = nucleotide sequence coding TraH-F122C-Knob
  source 1..1350: mol_type = other DNA
gaagttcaacttgtggagtctggaggcggtttggtacaacctggaggttcacttcgtttgtcatgtgctgcctctgggtttaatatcaaggatacttatattcattgggttcgccaggcacccggaaaagggctggaatgggtggcccgtatatatcccactaacggttacactcgatatgctgactctgtaaagggtcgatttactatatccgctgatactagcaaaaacactgcctacctccagatgaacagtctgcgcgccgaggatacagcagtttattattgttcccgatggggaggtgacgggttctatgccatggactactggggtcaagggacactggtaaccgtttcttctgctagcaccaaaggacctagtgtttgtcctcttgccccttcctcaaagtctacctctggggggacagccgctctgggctgcctggtcaaggattatttcccagagcctgtcactgtcagttggaactctggagccttgacttctggtgttcatacatttcctgctgtccttcaaagcagcggcttgtactcattgtcttctgttgtgacagtaccctcaagcagcctcggcactcagacatacatctgcaatgtcaaccacaaaccctcaaatacaaaggtagataaaaaagtcgaaccaaagtcttgtgacaaaactcacacgtgcccaccgtgcccagcacctgaactcctggggggaccgtcagtcttcctcttccccccaaaacccaaggacaccctcatgatctcccggacccctgaggtcacatgcgtggtggtggacgtgagccacgaagaccctgaggtcaagttcaactggtacgtggacggcgtggaggtgcataatgccaagacaaagccgcgggaggagcagtacaacagcacgtaccgtgtggtcagcgtcctcaccgtcctgcaccaggactggctgaatggcaaggagtacaagtgcaaggtctccaacaaagccctcccagcccccatcgagaaaaccatctccaaagccaaagggcagccccgagaaccacaggtgtacaccctgcccccatgccgggaggagatgaccaagaaccaggtcagcctgtggtgcctggtcaaaggcttctatcccagcgacatcgccgtggagtgggagagcaatgggcagccggagaacaactacaagaccacgcctcccgtgctggactccgacggctccttcttcctctacagcaagctcaccgtggacaagagcaggtggcagcaggggaacgtcttctcatgctccgtgatgcatgaggctctgcacaaccactacacgcagaagagcctctccctgtctccgggtaaa

SEQ ID NO: 464 - DNA, 1383 bp, synthetic construct
  misc_feature 1..1383: note = nucleotide sequence coding TraL-S121C-Knob
  source 1..1383: mol_type = other DNA
gacattcagatgacccaatccccctctagcctttcagcctccgtaggggacagagttacaataacctgtagggctagtcaggacgttaatacagcagtcgcatggtaccagcagaagcccggtaaggctcctaagcttttgatctacagtgcttctttcctgtattctggtgtacctagccgattctcaggctctcggagtggcacagacttcactctgacaatttcaagtctccagccagaagattttgcaacctactactgccaacaacactacactactcctccaaccttcggacagggcacaaaagtagagattaagcgtacggtggcagctcccagcgtttttatctttcccccatgtgacgagcagctcaagagtggcactgcctctgtagtttgtttgctgaataacttctatccacgtgaagcaaaagtacagtggaaggtcgataatgcccttcagagcggtaacagccaagaaagtgttaccgagcaagattccaaagattccacttacagtctgtccagcacattgacactgagtaaggctgattacgaaaaacacaaggtgtacgcatgcgaggtgacacaccaaggtctttcatctcctgtaactaagagctttaaccggggagaatgtggtggtgggggcagcgggggcggaggtagtggaggcggcggtagtgaaccaaagagtagtgacaaaactcacacgtgcccaccgtgcccagcacctgaactcctggggggaccgtcagtcttcctcttccccccaaaacccaaggacaccctcatgatctcccggacccctgaggtcacatgcgtggtggtggacgtgagccacgaagaccctgaggtcaagttcaactggtacgtggacggcgtggaggtgcataatgccaagacaaagccgcgggaggagcagtacaacagcacgtaccgtgtggtcagcgtcctcaccgtcctgcaccaggactggctgaatggcaaggagtacaagtgcaaggtctccaacaaagccctcccagcccccatcgagaaaaccatctccaaagccaaagggcagccccgagaaccacaggtgtacaccctgcccccatgccgggaggagatgaccaagaaccaggtcagcctgtggtgcctggtcaaaggcttctatcccagcgacatcgccgtggagtgggagagcaatgggcagccggagaacaactacaagaccacgcctcccgtgctggactccgacggctccttcttcctctacagcaagctcaccgtggacaagagcaggtggcagcaggggaacgtcttctcatgctccgtgatgcatgaggctctgcacaacagatttacgcagaagagcctctccctgtctccgggtaaa

SEQ ID NO: 465 - DNA, 1350 bp, synthetic construct
  misc_feature 1..1350: note = nucleotide sequence coding TraH-G44C-Knob
  source 1..1350: mol_type = other DNA
gaagttcaacttgtggagtctggaggcggtttggtacaacctggaggttcacttcgtttgtcatgtgctgcctctgggtttaatatcaaggatacttatattcattgggttcgccaggcacccggaaaatgcctggaatgggtggcccgtatatatcccactaacggttacactcgatatgctgactctgtaaagggtcgatttactatatccgctgatactagcaaaaacactgcctacctccagatgaacagtctgcgcgccgaggatacagcagtttattattgttcccgatggggaggtgacgggttctatgccatggactactggggtcaagggacactggtaaccgtttcttctgctagcaccaaaggacctagtgtttttcctcttgccccttcctcaaagtctacctctggggggacagccgctctgggctgcctggtcaaggattatttcccagagcctgtcactgtcagttggaactctggagccttgacttctggtgttcatacatttcctgctgtccttcaaagcagcggcttgtactcattgtcttctgttgtgacagtaccctcaagcagcctcggcactcagacatacatctgcaatgtcaaccacaaaccctcaaatacaaaggtagataaaaaagtcgaaccaaagtcttgtgacaaaactcacacgtgcccaccgtgcccagcacctgaactcctggggggaccgtcagtcttcctcttccccccaaaacccaaggacaccctcatgatctcccggacccctgaggtcacatgcgtggtggtggacgtgagccacgaagaccctgaggtcaagttcaactggtacgtggacggcgtggaggtgcataatgccaagacaaagccgcgggaggagcagtacaacagcacgtaccgtgtggtcagcgtcctcaccgtcctgcaccaggactggctgaatggcaaggagtacaagtgcaaggtctccaacaaagccctcccagcccccatcgagaaaaccatctccaaagccaaagggcagccccgagaaccacaggtgtacaccctgcccccatgccgggaggagatgaccaagaaccaggtcagcctgtggtgcctggtcaaaggcttctatcccagcgacatcgccgtggagtgggagagcaatgggcagccggagaacaactacaagaccacgcctcccgtgctggactccgacggctccttcttcctctacagcaagctcaccgtggacaagagcaggtggcagcaggggaacgtcttctcatgctccgtgatgcatgaggctctgcacaaccactacacgcagaagagcctctccctgtctccgggtaaa

SEQ ID NO: 466 - DNA, 1383 bp, synthetic construct
  misc_feature 1..1383: note = nucleotide sequence coding TraL-Q100C-Knob
  source 1..1383: mol_type = other DNA
gacattcagatgacccaatccccctctagcctttcagcctccgtaggggacagagttacaataacctgtagggctagtcaggacgttaatacagcagtcgcatggtaccagcagaagcccggtaaggctcctaagcttttgatctacagtgcttctttcctgtattctggtgtacctagccgattctcaggctctcggagtggcacagacttcactctgacaatttcaagtctccagccagaagattttgcaacctactactgccaacaacactacactactcctccaaccttcggatgtggcacaaaagtagagattaagcgtacggtggcagctcccagcgtttttatctttcccccatccgacgagcagctcaagagtggcactgcctctgtagtttgtttgctgaataacttctatccacgtgaagcaaaagtacagtggaaggtcgataatgcccttcagagcggtaacagccaagaaagtgttaccgagcaagattccaaagattccacttacagtctgtccagcacattgacactgagtaaggctgattacgaaaaacacaaggtgtacgcatgcgaggtgacacaccaaggtctttcatctcctgtaactaagagctttaaccggggagaatgtggtggtgggggcagcgggggcggaggtagtggaggcggcggtagtgaaccaaagagtagtgacaaaactcacacgtgcccaccgtgcccagcacctgaactcctggggggaccgtcagtcttcctcttccccccaaaacccaaggacaccctcatgatctcccggacccctgaggtcacatgcgtggtggtggacgtgagccacgaagaccctgaggtcaagttcaactggtacgtggacggcgtggaggtgcataatgccaagacaaagccgcgggaggagcagtacaacagcacgtaccgtgtggtcagcgtcctcaccgtcctgcaccaggactggctgaatggcaaggagtacaagtgcaaggtctccaacaaagccctcccagcccccatcgagaaaaccatctccaaagccaaagggcagccccgagaaccacaggtgtacaccctgcccccatgccgggaggagatgaccaagaaccaggtcagcctgtggtgcctggtcaaaggcttctatcccagcgacatcgccgtggagtgggagagcaatgggcagccggagaacaactacaagaccacgcctcccgtgctggactccgacggctccttcttcctctacagcaagctcaccgtggacaagagcaggtggcagcaggggaacgtcttctcatgctccgtgatgcatgaggctctgcacaaccactacacgcagaagagcctctccctgtctccgggtaaa

SEQ ID NO: 467 - DNA, 1368 bp, synthetic construct
  misc_feature 1..1368: note = nucleotide sequence coding TraL-Q100C-Knob1
  source 1..1368: mol_type = other DNA
gacattcagatgacccaatccccctctagcctttcagcctccgtaggggacagagttacaataacctgtagggctagtcaggacgttaatacagcagtcgcatggtaccagcagaagcccggtaaggctcctaagcttttgatctacagtgcttctttcctgtattctggtgtacctagccgattctcaggctctcggagtggcacagacttcactctgacaatttcaagtctccagccagaagattttgcaacctactactgccaacaacactacactactcctccaaccttcggatgtggcacaaaagtagagattaagcgtacggtggcagctcccagcgtttttatctttcccccatccgacgagcagctcaagagtggcactgcctctgtagtttgtttgctgaataacttctatccacgtgaagcaaaagtacagtggaaggtcgataatgcccttcagagcggtaacagccaagaaagtgttaccgagcaagattccaaagattccacttacagtctgtccagcacattgacactgagtaaggctgattacgaaaaacacaaggtgtacgcatgcgaggtgacacaccaaggtctttcatctcctgtaactaagagctttaaccggggagaatgtggtggtgggggcagcgggggcggaggtagtgaaccaaagagtagtgacaaaactcacacgtgcccaccgtgcccagcacctgaactcctggggggaccgtcagtcttcctcttccccccaaaacccaaggacaccctcatgatctcccggacccctgaggtcacatgcgtggtggtggacgtgagccacgaagaccctgaggtcaagttcaactggtacgtggacggcgtggaggtgcataatgccaagacaaagccgcgggaggagcagtacaacagcacgtaccgtgtggtcagcgtcctcaccgtcctgcaccaggactggctgaatggcaaggagtacaagtgcaaggtctccaacaaagccctcccagcccccatcgagaaaaccatctccaaagccaaagggcagccccgagaaccacaggtgtacaccctgcccccatgccgggaggagatgaccaagaaccaggtcagcctgtggtgcctggtcaaaggcttctatcccagcgacatcgccgtggagtgggagagcaatgggcagccggagaacaactacaagaccacgcctcccgtgctggactccgacggctccttcttcctctacagcaagctcaccgtggacaagagcaggtggcagcaggggaacgtcttctcatgctccgtgatgcatgaggctctgcacaaccactacacgcagaagagcctctccctgtctccgggtaaa

SEQ ID NO: 468 - DNA, 1353 bp, synthetic construct
  misc_feature 1..1353: note = nucleotide sequence coding TraL-Q100C-Knob2
  source 1..1353: mol_type = other DNA
gacattcagatgacccaatccccctctagcctttcagcctccgtaggggacagagttacaataacctgtagggctagtcaggacgttaatacagcagtcgcatggtaccagcagaagcccggtaaggctcctaagcttttgatctacagtgcttctttcctgtattctggtgtacctagccgattctcaggctctcggagtggcacagacttcactctgacaatttcaagtctccagccagaagattttgcaacctactactgccaacaacactacactactcctccaaccttcggatgtggcacaaaagtagagattaagcgtacggtggcagctcccagcgtttttatctttcccccatccgacgagcagctcaagagtggcactgcctctgtagtttgtttgctgaataacttctatccacgtgaagcaaaagtacagtggaaggtcgataatgcccttcagagcggtaacagccaagaaagtgttaccgagcaagattccaaagattccacttacagtctgtccagcacattgacactgagtaaggctgattacgaaaaacacaaggtgtacgcatgcgaggtgacacaccaaggtctttcatctcctgtaactaagagctttaaccggggagaatgtggtggtgggggcagcgaaccaaagagtagtgacaaaactcacacgtgcccaccgtgcccagcacctgaactcctggggggaccgtcagtcttcctcttccccccaaaacccaaggacaccctcatgatctcccggacccctgaggtcacatgcgtggtggtggacgtgagccacgaagaccctgaggtcaagttcaactggtacgtggacggcgtggaggtgcataatgccaagacaaagccgcgggaggagcagtacaacagcacgtaccgtgtggtcagcgtcctcaccgtcctgcaccaggactggctgaatggcaaggagtacaagtgcaaggtctccaacaaagccctcccagcccccatcgagaaaaccatctccaaagccaaagggcagccccgagaaccacaggtgtacaccctgcccccatgccgggaggagatgaccaagaaccaggtcagcctgtggtgcctggtcaaaggcttctatcccagcgacatcgccgtggagtgggagagcaatgggcagccggagaacaactacaagaccacgcctcccgtgctggactccgacggctccttcttcctctacagcaagctcaccgtggacaagagcaggtggcagcaggggaacgtcttctcatgctccgtgatgcatgaggctctgcacaaccactacacgcagaagagcctctccctgtctccgggtaaa

SEQ ID NO: 469 - DNA, 1338 bp, synthetic construct
  misc_feature 1..1338: note = nucleotide sequence coding TraL-Q100C-Knob3
  source 1..1338: mol_type = other DNA
gacattcagatgacccaatccccctctagcctttcagcctccgtaggggacagagttacaataacctgtagggctagtcaggacgttaatacagcagtcgcatggtaccagcagaagcccggtaaggctcctaagcttttgatctacagtgcttctttcctgtattctggtgtacctagccgattctcaggctctcggagtggcacagacttcactctgacaatttcaagtctccagccagaagattttgcaacctactactgccaacaacactacactactcctccaaccttcggatgtggcacaaaagtagagattaagcgtacggtggcagctcccagcgtttttatctttcccccatccgacgagcagctcaagagtggcactgcctctgtagtttgtttgctgaataacttctatccacgtgaagcaaaagtacagtggaaggtcgataatgcccttcagagcggtaacagccaagaaagtgttaccgagcaagattccaaagattccacttacagtctgtccagcacattgacactgagtaaggctgattacgaaaaacacaaggtgtacgcatgcgaggtgacacaccaaggtctttcatctcctgtaactaagagctttaaccggggagaatgtgaaccaaagagtagtgacaaaactcacacgtgcccaccgtgcccagcacctgaactcctggggggaccgtcagtcttcctcttccccccaaaacccaaggacaccctcatgatctcccggacccctgaggtcacatgcgtggtggtggacgtgagccacgaagaccctgaggtcaagttcaactggtacgtggacggcgtggaggtgcataatgccaagacaaagccgcgggaggagcagtacaacagcacgtaccgtgtggtcagcgtcctcaccgtcctgcaccaggactggctgaatggcaaggagtacaagtgcaaggtctccaacaaagccctcccagcccccatcgagaaaaccatctccaaagccaaagggcagccccgagaaccacaggtgtacaccctgcccccatgccgggaggagatgaccaagaaccaggtcagcctgtggtgcctggtcaaaggcttctatcccagcgacatcgccgtggagtgggagagcaatgggcagccggagaacaactacaagaccacgcctcccgtgctggactccgacggctccttcttcctctacagcaagctcaccgtggacaagagcaggtggcagcaggggaacgtcttctcatgctccgtgatgcatgaggctctgcacaaccactacacgcagaagagcctctccctgtctccgggtaaa

SEQ ID NO: 470 - DNA, 360 bp, synthetic construct
  misc_feature 1..360: note = nucleotide sequence coding H01 VH
  source 1..360: mol_type = other DNA
gaagttcaacttgtggagtctggaggcggtttggtacaacctggaggttcacttcgtttgtcatgtgctgcctctgggtttaatatcaaggatacttatattcattgggttcgccaggcacccggaaaatgcctggaatgggtggcccgtatatatcccactaacggttacactcgatatgctgactctgtaaagggtcgatttactatatccgctgatactagcaaaaacactgcctacctccagatgaacagtctgcgcgccgaggatacagcagtttattattgttcccgatggggaggtgacgggttctatgccatggactactggggtcaagggacactggtaaccgtttcttct

SEQ ID NO: 471 - DNA, 321 bp, synthetic construct
  misc_feature 1..321: note = nucleotide sequence coding H01 VL
  source 1..321: mol_type = other DNA
gacattcagatgacccaatccccctctagcctttcagcctccgtaggggacagagttacaataacctgtagggctagtcaggacgttaatacagcagtcgcatggtaccagcagaagcccggtaaggctcctaagcttttgatctacagtgcttctttcctgtattctggtgtacctagccgattctcaggctctcggagtggcacagacttcactctgacaatttcaagtctccagccagaagattttgcaacctactactgccaacaacactacactactcctccaaccttcggatgtggcacaaaagtagagattaag

SEQ ID NO: 472 - DNA, 1347 bp, synthetic construct
  misc_feature 1..1347: note = nucleotide sequence coding PerH-G44C-Knob
  source 1..1347: mol_type = other DNA
gaagtacagttggtggagtctggtggaggtcttgtacaacctggcgggagtttgcggctttcctgcgctgcaagcgggtttaccttcaccgattataccatggattgggtacgccaagcccctggtaagtgccttgagtgggttgccgatgtaaaccctaattccggaggaagtatctataatcaacgcttcaagggccgattcactctgagtgtggatcgaagcaagaacaccttgtacttgcagatgaattccttgcgggctgaagacacagccgtctattactgcgcccgaaatttggggccttcattctattttgactattggggtcagggaactctggtaactgtttcaagtgctagcaccaaaggacctagtgtttttcctcttgccccttcctcaaagtctacctctggggggacagccgctctgggctgcctggtcaaggattatttcccagagcctgtcactgtcagttggaactctggagccttgacttctggtgttcatacatttcctgctgtccttcaaagcagcggcttgtactcattgtcttctgttgtgacagtaccctcaagcagcctcggcactcagacatacatctgcaatgtcaaccacaaaccctcaaatacaaaggtagataaaaaagtcgaaccaaagtcttgtgacaaaactcacacgtgcccaccgtgcccagcacctgaactcctggggggaccgtcagtcttcctcttccccccaaaacccaaggacaccctcatgatctcccggacccctgaggtcacatgcgtggtggtggacgtgagccacgaagaccctgaggtcaagttcaactggtacgtggacggcgtggaggtgcataatgccaagacaaagccgcgggaggagcagtacaacagcacgtaccgtgtggtcagcgtcctcaccgtcctgcaccaggactggctgaatggcaaggagtacaagtgcaaggtctccaacaaagccctcccagcccccatcgagaaaaccatctccaaagccaaagggcagccccgagaaccacaggtgtacaccctgcccccatgccgggaggagatgaccaagaaccaggtcagcctgtggtgcctggtcaaaggcttctatcccagcgacatcgccgtggagtgggagagcaatgggcagccggagaacaactacaagaccacgcctcccgtgctggactccgacggctccttcttcctctacagcaagctcaccgtggacaagagcaggtggcagcaggggaacgtcttctcatgctccgtgatgcatgaggctctgcacaaccactacacgcagaagagcctctccctgtctccgggtaaa

SEQ ID NO: 473 - DNA, 1383 bp, synthetic construct
  misc_feature 1..1383: note = nucleotide sequence coding PerL-Q100C-Knob
  source 1..1383: mol_type = other DNA
gatattcaaatgacccaaagtccaagttccctttcagcatctgtcggtgatcgagtcactataacttgtaaggccagccaagacgttagcataggagtagcatggtaccaacaaaagcctgggaaggctcccaaacttctcatttattctgcttcctaccgatatactggtgtcccaagtagattttctggcagcggatctggaactgattttacattgactatcagctccctccagcctgaggacttcgctacttattactgccaacagtactacatttatccctatacattcggttgtgggaccaaagtagagatcaaacgtacggtggcagctcccagcgtttttatctttcccccatccgacgagcagctcaagagtggcactgcctctgtagtttgtttgctgaataacttctatccacgtgaagcaaaagtacagtggaaggtcgataatgcccttcagagcggtaacagccaagaaagtgttaccgagcaagattccaaagattccacttacagtctgtccagcacattgacactgagtaaggctgattacgaaaaacacaaggtgtacgcatgcgaggtgacacaccaaggtctttcatctcctgtaactaagagctttaaccggggagaatgtggtggtgggggcagcgggggcggaggtagtggaggcggcggtagtgaaccaaagagtagtgacaaaactcacacgtgcccaccgtgcccagcacctgaactcctggggggaccgtcagtcttcctcttccccccaaaacccaaggacaccctcatgatctcccggacccctgaggtcacatgcgtggtggtggacgtgagccacgaagaccctgaggtcaagttcaactggtacgtggacggcgtggaggtgcataatgccaagacaaagccgcgggaggagcagtacaacagcacgtaccgtgtggtcagcgtcctcaccgtcctgcaccaggactggctgaatggcaaggagtacaagtgcaaggtctccaacaaagccctcccagcccccatcgagaaaaccatctccaaagccaaagggcagccccgagaaccacaggtgtacaccctgcccccatgccgggaggagatgaccaagaaccaggtcagcctgtggtgcctggtcaaaggcttctatcccagcgacatcgccgtggagtgggagagcaatgggcagccggagaacaactacaagaccacgcctcccgtgctggactccgacggctccttcttcctctacagcaagctcaccgtggacaagagcaggtggcagcaggggaacgtcttctcatgctccgtgatgcatgaggctctgcacaaccactacacgcagaagagcctctccctgtctccgggtaaa

SEQ ID NO: 474 - DNA, 357 bp, synthetic construct
  misc_feature 1..357: note = nucleotide sequence coding P01 VH
  source 1..357: mol_type = other DNA
gaagtacagttggtggagtctggtggaggtcttgtacaacctggcgggagtttgcggctttcctgcgctgcaagcgggtttaccttcaccgattataccatggattgggtacgccaagcccctggtaagtgccttgagtgggttgccgatgtaaaccctaattccggaggaagtatctataatcaacgcttcaagggccgattcactctgagtgtggatcgaagcaagaacaccttgtacttgcagatgaattccttgcgggctgaagacacagccgtctattactgcgcccgaaatttggggccttcattctattttgactattggggtcagggaactctggtaactgtttcaagt

SEQ ID NO: 475 - DNA, 321 bp, synthetic construct
  misc_feature 1..321: note = nucleotide sequence coding P01 VL
  source 1..321: mol_type = other DNA
gatattcaaatgacccaaagtccaagttccctttcagcatctgtcggtgatcgagtcactataacttgtaaggccagccaagacgttagcataggagtagcatggtaccaacaaaagcctgggaaggctcccaaacttctcatttattctgcttcctaccgatatactggtgtcccaagtagattttctggcagcggatctggaactgattttacattgactatcagctccctccagcctgaggacttcgctacttattactgccaacagtactacatttatccctatacattcggttgtgggaccaaagtagagatcaaa

SEQ ID NO: 476 - DNA, 681 bp, synthetic construct
  misc_feature 1..681: note = nucleotide sequence coding wtFc
  source 1..681: mol_type = other DNA
gacaaaactcacacatgcccaccgtgcccagcacctgaactcctggggggaccgtcagtcttcctcttccccccaaaacccaaggacaccctcatgatctcccggacccctgaggtcacatgcgtggtggtggacgtgagccacgaagaccctgaggtcaagttcaactggtacgtggacggcgtggaggtgcataatgccaagacaaagccgcgggaggagcagtacaacagcacgtaccgtgtggtcagcgtcctcaccgtcctgcaccaggactggctgaatggcaaggagtacaagtgcaaggtctccaacaaagccctcccagcccccatcgagaaaaccatctccaaagccaaagggcagccccgagaaccacaggtgtacaccctgcccccatcccgggaggagatgaccaagaaccaggtcagcctgacgtgcctggtcaaaggcttctatcccagcgacatcgccgtggagtgggagagcaatgggcagccggagaacaactacaagaccacgcctcccgtgctggactccgacggctccttcttcctctacagcaagctcaccgtggacaagagcaggtggcagcaggggaacgtcttctcatgctccgtgatgcatgaggctctgcacaaccactacacgcagaagagcctctccctgtctccgggtaaa

SEQ ID NO: 477 - DNA, 1350 bp, synthetic construct
  misc_feature 1..1350: note = nucleotide sequence coding TraH-G44C-wtFc
  source 1..1350: mol_type = other DNA
gaagttcaacttgtggagtctggaggcggtttggtacaacctggaggttcacttcgtttgtcatgtgctgcctctgggtttaatatcaaggatacttatattcattgggttcgccaggcacccggaaaatgcctggaatgggtggcccgtatatatcccactaacggttacactcgatatgctgactctgtaaagggtcgatttactatatccgctgatactagcaaaaacactgcctacctccagatgaacagtctgcgcgccgaggatacagcagtttattattgttcccgatggggaggtgacgggttctatgccatggactactggggtcaagggacactggtaaccgtttcttctgctagcaccaaaggacctagtgtttttcctcttgccccttcctcaaagtctacctctggggggacagccgctctgggctgcctggtcaaggattatttcccagagcctgtcactgtcagttggaactctggagccttgacttctggtgttcatacatttcctgctgtccttcaaagcagcggcttgtactcattgtcttctgttgtgacagtaccctcaagcagcctcggcactcagacatacatctgcaatgtcaaccacaaaccctcaaatacaaaggtagataaaaaagtcgaaccaaagtcttgtgacaaaactcacacgtgcccaccgtgcccagcacctgaactcctggggggaccgtcagtcttcctcttccccccaaaacccaaggacaccctcatgatctcccggacccctgaggtcacatgcgtggtggtggacgtgagccacgaagaccctgaggtcaagttcaactggtacgtggacggcgtggaggtgcataatgccaagacaaagccgcgggaggagcagtacaacagcacgtaccgtgtggtcagcgtcctcaccgtcctgcaccaggactggctgaatggcaaggagtacaagtgcaaggtctccaacaaagccctcccagcccccatcgagaaaaccatctccaaagccaaagggcagccccgagaaccacaggtgtacaccctgcccccaagccgggaggagatgaccaagaaccaggtcagcctgacgtgcctggtcaaaggcttctatcccagcgacatcgccgtggagtgggagagcaatgggcagccggagaacaactacaagaccacgcctcccgtgctggactccgacggctccttcttcctctacagcaagctcaccgtggacaagagcaggtggcagcaggggaacgtcttctcatgctccgtgatgcatgaggctctgcacaaccactacacgcagaagagcctctccctgtctccgggtaaa

SEQ ID NO: 478 - DNA, 1383 bp, synthetic construct
  misc_feature 1..1383: note = nucleotide sequence coding TraL-Q100C-wtFc
  source 1..1383: mol_type = other DNA
gacattcagatgacccaatccccctctagcctttcagcctccgtaggggacagagttacaataacctgtagggctagtcaggacgttaatacagcagtcgcatggtaccagcagaagcccggtaaggctcctaagcttttgatctacagtgcttctttcctgtattctggtgtacctagccgattctcaggctctcggagtggcacagacttcactctgacaatttcaagtctccagccagaagattttgcaacctactactgccaacaacactacactactcctccaaccttcggatgtggcacaaaagtagagattaagcgtacggtggcagctcccagcgtttttatctttcccccatccgacgagcagctcaagagtggcactgcctctgtagtttgtttgctgaataacttctatccacgtgaagcaaaagtacagtggaaggtcgataatgcccttcagagcggtaacagccaagaaagtgttaccgagcaagattccaaagattccacttacagtctgtccagcacattgacactgagtaaggctgattacgaaaaacacaaggtgtacgcatgcgaggtgacacaccaaggtctttcatctcctgtaactaagagctttaaccggggagaatgtggtggtgggggcagcgggggcggaggtagtggaggcggcggtagtgaaccaaagagtagtgacaaaactcacacgtgcccaccgtgcccagcacctgaactcctggggggaccgtcagtcttcctcttccccccaaaacccaaggacaccctcatgatctcccggacccctgaggtcacatgcgtggtggtggacgtgagccacgaagaccctgaggtcaagttcaactggtacgtggacggcgtggaggtgcataatgccaagacaaagccgcgggaggagcagtacaacagcacgtaccgtgtggtcagcgtcctcaccgtcctgcaccaggactggctgaatggcaaggagtacaagtgcaaggtctccaacaaagccctcccagcccccatcgagaaaaccatctccaaagccaaagggcagccccgagaaccacaggtgtacaccctgcccccaagccgggaggagatgaccaagaaccaggtcagcctgacgtgcctggtcaaaggcttctatcccagcgacatcgccgtggagtgggagagcaatgggcagccggagaacaactacaagaccacgcctcccgtgctggactccgacggctccttcttcctctacagcaagctcaccgtggacaagagcaggtggcagcaggggaacgtcttctcatgctccgtgatgcatgaggctctgcacaaccactacacgcagaagagcctctccctgtctccgggtaaa

SEQ ID NO: 479 - DNA, 681 bp, synthetic construct
  misc_feature 1..681: note = nucleotide sequence coding Fc-Hole-S239D-I332E
  source 1..681: mol_type = other DNA
gacaaaactcacacatgcccaccgtgcccagcacctgaactcctggggggaccggatgtcttcctcttccccccaaaacccaaggacaccctcatgatctcccggacccctgaggtcacatgcgtggtggtggacgtgagccacgaagaccctgaggtcaagttcaactggtacgtggacggcgtggaggtgcataatgccaagacaaagccgcgggaggagcagtacaacagcacgtaccgtgtggtcagcgtcctcaccgtcctgcaccaggactggctgaatggcaaggagtacaagtgcaaggtctccaacaaagccctcccagcccccgaagagaaaaccatctccaaagccaaagggcagccccgagaaccacaggtgtgcaccctgcccccatcccgggaggagatgaccaagaaccaggtcagcctgagctgcgcggtcaaaggcttctatcccagcgacatcgccgtggagtgggagagcaatgggcagccggagaacaactacaagaccacgcctcccgtgctggactccgacggctccttcttcctcgtgagcaagctcaccgtggacaagagcaggtggcagcaggggaacgtcttctcatgctccgtgatgcatgaggctctgcacaaccactacacgcagaagagcctctccctgtctccgggtaaa

SEQ ID NO: 480 - DNA, 1350 bp, synthetic construct
  misc_feature 1..1350: note = nucleotide sequence coding TraH-G44C-Knob-S239D-I332E
  source 1..1350: mol_type = other DNA
gaagttcaacttgtggagtctggaggcggtttggtacaacctggaggttcacttcgtttgtcatgtgctgcctctgggtttaatatcaaggatacttatattcattgggttcgccaggcacccggaaaatgcctggaatgggtggcccgtatatatcccactaacggttacactcgatatgctgactctgtaaagggtcgatttactatatccgctgatactagcaaaaacactgcctacctccagatgaacagtctgcgcgccgaggatacagcagtttattattgttcccgatggggaggtgacgggttctatgccatggactactggggtcaagggacactggtaaccgtttcttctgctagcaccaaaggacctagtgtttttcctcttgccccttcctcaaagtctacctctggggggacagccgctctgggctgcctggtcaaggattatttcccagagcctgtcactgtcagttggaactctggagccttgacttctggtgttcatacatttcctgctgtccttcaaagcagcggcttgtactcattgtcttctgttgtgacagtaccctcaagcagcctcggcactcagacatacatctgcaatgtcaaccacaaaccctcaaatacaaaggtagataaaaaagtcgaaccaaagtcttgtgacaaaactcacacgtgcccaccgtgcccagcacctgaactcctggggggaccggatgtcttcctcttccccccaaaacccaaggacaccctcatgatctcccggacccctgaggtcacatgcgtggtggtggacgtgagccacgaagaccctgaggtcaagttcaactggtacgtggacggcgtggaggtgcataatgccaagacaaagccgcgggaggagcagtacaacagcacgtaccgtgtggtcagcgtcctcaccgtcctgcaccaggactggctgaatggcaaggagtacaagtgcaaggtctccaacaaagccctcccagcccccgaagagaaaaccatctccaaagccaaagggcagccccgagaaccacaggtgtacaccctgcccccatgccgggaggagatgaccaagaaccaggtcagcctgtggtgcctggtcaaaggcttctatcccagcgacatcgccgtggagtgggagagcaatgggcagccggagaacaactacaagaccacgcctcccgtgctggactccgacggctccttcttcctctacagcaagctcaccgtggacaagagcaggtggcagcaggggaacgtcttctcatgctccgtgatgcatgaggctctgcacaaccactacacgcagaagagcctctccctgtctccgggtaaa

SEQ ID NO: 481 - DNA, 1383 bp, synthetic construct
  misc_feature 1..1383: note = nucleotide sequence coding TraL-Q100C-Knob-S239D-I332E
  source 1..1383: mol_type = other DNA
gacattcagatgacccaatccccctctagcctttcagcctccgtaggggacagagttacaataacctgtagggctagtcaggacgttaatacagcagtcgcatggtaccagcagaagcccggtaaggctcctaagcttttgatctacagtgcttctttcctgtattctggtgtacctagccgattctcaggctctcggagtggcacagacttcactctgacaatttcaagtctccagccagaagattttgcaacctactactgccaacaacactacactactcctccaaccttcggatgtggcacaaaagtagagattaagcgtacggtggcagctcccagcgtttttatctttcccccatccgacgagcagctcaagagtggcactgcctctgtagtttgtttgctgaataacttctatccacgtgaagcaaaagtacagtggaaggtcgataatgcccttcagagcggtaacagccaagaaagtgttaccgagcaagattccaaagattccacttacagtctgtccagcacattgacactgagtaaggctgattacgaaaaacacaaggtgtacgcatgcgaggtgacacaccaaggtctttcatctcctgtaactaagagctttaaccggggagaatgtggtggtgggggcagcgggggcggaggtagtggaggcggcggtagtgaaccaaagagtagtgacaaaactcacacgtgcccaccgtgcccagcacctgaactcctggggggaccggatgtcttcctcttccccccaaaacccaaggacaccctcatgatctcccggacccctgaggtcacatgcgtggtggtggacgtgagccacgaagaccctgaggtcaagttcaactggtacgtggacggcgtggaggtgcataatgccaagacaaagccgcgggaggagcagtacaacagcacgtaccgtgtggtcagcgtcctcaccgtcctgcaccaggactggctgaatggcaaggagtacaagtgcaaggtctccaacaaagccctcccagcccccgaagagaaaaccatctccaaagccaaagggcagccccgagaaccacaggtgtacaccctgcccccatgccgggaggagatgaccaagaaccaggtcagcctgtggtgcctggtcaaaggcttctatcccagcgacatcgccgtggagtgggagagcaatgggcagccggagaacaactacaagaccacgcctcccgtgctggactccgacggctccttcttcctctacagcaagctcaccgtggacaagagcaggtggcagcaggggaacgtcttctcatgctccgtgatgcatgaggctctgcacaaccactacacgcagaagagcctctccctgtctccgggtaaa

SEQ ID NO: 482 - DNA, 1347 bp, synthetic construct
  misc_feature 1..1347: note = nucleotide sequence coding PerH-G44C-Knob-S239D-I332E
  source 1..1347: mol_type = other DNA
gaagtacagttggtggagtctggtggaggtcttgtacaacctggcgggagtttgcggctttcctgcgctgcaagcgggtttaccttcaccgattataccatggattgggtacgccaagcccctggtaagtgccttgagtgggttgccgatgtaaaccctaattccggaggaagtatctataatcaacgcttcaagggccgattcactctgagtgtggatcgaagcaagaacaccttgtacttgcagatgaattccttgcgggctgaagacacagccgtctattactgcgcccgaaatttggggccttcattctattttgactattggggtcagggaactctggtaactgtttcaagtgctagcaccaaaggacctagtgtttttcctcttgccccttcctcaaagtctacctctggggggacagccgctctgggctgcctggtcaaggattatttcccagagcctgtcactgtcagttggaactctggagccttgacttctggtgttcatacatttcctgctgtccttcaaagcagcggcttgtactcattgtcttctgttgtgacagtaccctcaagcagcctcggcactcagacatacatctgcaatgtcaaccacaaaccctcaaatacaaaggtagataaaaaagtcgaaccaaagtcttgtgacaaaactcacacgtgcccaccgtgcccagcacctgaactcctggggggaccggatgtcttcctcttccccccaaaacccaaggacaccctcatgatctcccggacccctgaggtcacatgcgtggtggtggacgtgagccacgaagaccctgaggtcaagttcaactggtacgtggacggcgtggaggtgcataatgccaagacaaagccgcgggaggagcagtacaacagcacgtaccgtgtggtcagcgtcctcaccgtcctgcaccaggactggctgaatggcaaggagtacaagtgcaaggtctccaacaaagccctcccagcccccgaagagaaaaccatctccaaagccaaagggcagccccgagaaccacaggtgtacaccctgcccccatgccgggaggagatgaccaagaaccaggtcagcctgtggtgcctggtcaaaggcttctatcccagcgacatcgccgtggagtgggagagcaatgggcagccggagaacaactacaagaccacgcctcccgtgctggactccgacggctccttcttcctctacagcaagctcaccgtggacaagagcaggtggcagcaggggaacgtcttctcatgctccgtgatgcatgaggctctgcacaaccactacacgcagaagagcctctccctgtctccgggtaaa

SEQ ID NO: 483 - DNA, 1383 bp, synthetic construct
  misc_feature 1..1383: note = nucleotide sequence coding PerL-Q100C-Knob-S239D-I332E
  source 1..1383: mol_type = other DNA
gatattcaaatgacccaaagtccaagttccctttcagcatctgtcggtgatcgagtcactataacttgtaaggccagccaagacgttagcataggagtagcatggtaccaacaaaagcctgggaaggctcccaaacttctcatttattctgcttcctaccgatatactggtgtcccaagtagattttctggcagcggatctggaactgattttacattgactatcagctccctccagcctgaggacttcgctacttattactgccaacagtactacatttatccctatacattcggttgtgggaccaaagtagagatcaaacgtacggtggcagctcccagcgtttttatctttcccccatccgacgagcagctcaagagtggcactgcctctgtagtttgtttgctgaataacttctatccacgtgaagcaaaagtacagtggaaggtcgataatgcccttcagagcggtaacagccaagaaagtgttaccgagcaagattccaaagattccacttacagtctgtccagcacattgacactgagtaaggctgattacgaaaaacacaaggtgtacgcatgcgaggtgacacaccaaggtctttcatctcctgtaactaagagctttaaccggggagaatgtggtggtgggggcagcgggggcggaggtagtggaggcggcggtagtgaaccaaagagtagtgacaaaactcacacgtgcccaccgtgcccagcacctgaactcctggggggaccggatgtcttcctcttccccccaaaacccaaggacaccctcatgatctcccggacccctgaggtcacatgcgtggtggtggacgtgagccacgaagaccctgaggtcaagttcaactggtacgtggacggcgtggaggtgcataatgccaagacaaagccgcgggaggagcagtacaacagcacgtaccgtgtggtcagcgtcctcaccgtcctgcaccaggactggctgaatggcaaggagtacaagtgcaaggtctccaacaaagccctcccagcccccgaagagaaaaccatctccaaagccaaagggcagccccgagaaccacaggtgtacaccctgcccccatgccgggaggagatgaccaagaaccaggtcagcctgtggtgcctggtcaaaggcttctatcccagcgacatcgccgtggagtgggagagcaatgggcagccggagaacaactacaagaccacgcctcccgtgctggactccgacggctccttcttcctctacagcaagctcaccgtggacaagagcaggtggcagcaggggaacgtcttctcatgctccgtgatgcatgaggctctgcacaaccactacacgcagaagagcctctccctgtctccgggtaaa

SEQ ID NO: 484 - DNA, 18 bp, synthetic construct
  misc_feature 1..18: note = nucleotide sequence coding VH-S-Linker
  source 1..18: mol_type = other DNA
gctagcacaaaaggacct

SEQ ID NO: 485 - DNA, 39 bp, synthetic construct
  misc_feature 1..39: note = nucleotide sequence coding VH-L-Linker
  source 1..39: mol_type = other DNA
gctagcacaaaaggacctagtgttttcccactggctcca

SEQ ID NO: 486 - DNA, 18 bp, synthetic construct
  misc_feature 1..18: note = nucleotide sequence coding VL-S-Linker
  source 1..18: mol_type = other DNA
cgtacggtggctgctcca

SEQ ID NO: 487 - DNA, 39 bp, synthetic construct
  misc_feature 1..39: note = nucleotide sequence coding VL-L-Linker
  source 1..39: mol_type = other DNA
cgtacggtggctgctccatccgtttttatctttccccca

SEQ ID NO: 488 - DNA, 1725 bp, synthetic construct
  misc_feature 1..1725: note = nucleotide sequence coding TH-S-PH-Knob
  source 1..1725: mol_type = other DNA
gaagttcaacttgtggagtctggaggcggtttggtacaacctggaggttcacttcgtttgtcatgtgctgcctctgggtttaatatcaaggatacttatattcattgggttcgccaggcacccggaaaagggctggaatgggtggcccgtatatatcccactaacggttacactcgatatgctgactctgtaaagggtcgatttactatatccgctgatactagcaaaaacactgcctacctccagatgaacagtctgcgcgccgaggatacagcagtttattattgttcccgatggggaggtgacgggttctatgccatggactactggggtcaagggacactggtaaccgtttcttctgctagcacaaaaggacctgaagtacagttggtggagtctggtggaggtcttgtacaacctggcgggagtttgcggctttcctgcgctgcaagcgggtttaccttcaccgattataccatggattgggtacgccaagcccctggtaagggccttgagtgggttgccgatgtaaaccctaattccggaggaagtatctataatcaacgcttcaagggccgattcactctgagtgtggatcgaagcaagaacaccttgtacttgcagatgaattccttgcgggctgaagacacagccgtctattactgcgcccgaaatttggggccttcattctattttgactattggggtcagggaactctggtaactgtttcaagtgctagcaccaaaggacctagtgtttttcctcttgccccttcctcaaagtctacctctggggggacagccgctctgggctgcctggtcaaggattatttcccagagcctgtcactgtcagttggaactctggagccttgacttctggtgttcatacatttcctgctgtccttcaaagcagcggcttgtactcattgtcttctgttgtgacagtaccctcaagcagcctcggcactcagacatacatctgcaatgtcaaccacaaaccctcaaatacaaaggtagataaaaaagtcgaaccaaagtcttgtgacaaaactcacacgtgcccaccgtgcccagcacctgaactcctggggggaccgtcagtcttcctcttccccccaaaacccaaggacaccctcatgatctcccggacccctgaggtcacatgcgtggtggtggacgtgagccacgaagaccctgaggtcaagttcaactggtacgtggacggcgtggaggtgcataatgccaagacaaagccgcgggaggagcagtacaacagcacgtaccgtgtggtcagcgtcctcaccgtcctgcaccaggactggctgaatggcaaggagtacaagtgcaaggtctccaacaaagccctcccagcccccatcgagaaaaccatctccaaagccaaagggcagccccgagaaccacaggtgtacaccctgcccccatgccgggaggagatgaccaagaaccaggtcagcctgtggtgcctggtcaaaggcttctatcccagcgacatcgccgtggagtgggagagcaatgggcagccggagaacaactacaagaccacgcctcccgtgctggactccgacggctccttcttcctctacagcaagctcaccgtggacaagagcaggtggcagcaggggaacgtcttctcatgctccgtgatgcatgaggctctgcacaaccactacacgcagaagagcctctccctgtctccgggtaaa

SEQ ID NO: 489 - DNA, 1725 bp, synthetic construct
  misc_feature 1..1725: note = nucleotide sequence coding THC-S-PH-Knob
  source 1..1725: mol_type = other DNA
gaagttcaacttgtggagtctggaggcggtttggtacaacctggaggttcacttcgtttgtcatgtgctgcctctgggtttaatatcaaggatacttatattcattgggttcgccaggcacccggaaaatgcctggaatgggtggcccgtatatatcccactaacggttacactcgatatgctgactctgtaaagggtcgatttactatatccgctgatactagcaaaaacactgcctacctccagatgaacagtctgcgcgccgaggatacagcagtttattattgttcccgatggggaggtgacgggttctatgccatggactactggggtcaagggacactggtaaccgtttcttctgctagcacaaaaggacctgaagtacagttggtggagtctggtggaggtcttgtacaacctggcgggagtttgcggctttcctgcgctgcaagcgggtttaccttcaccgattataccatggattgggtacgccaagcccctggtaagggccttgagtgggttgccgatgtaaaccctaattccggaggaagtatctataatcaacgcttcaagggccgattcactctgagtgtggatcgaagcaagaacaccttgtacttgcagatgaattccttgcgggctgaagacacagccgtctattactgcgcccgaaatttggggccttcattctattttgactattggggtcagggaactctggtaactgtttcaagtgctagcaccaaaggacctagtgtttttcctcttgccccttcctcaaagtctacctctggggggacagccgctctgggctgcctggtcaaggattatttcccagagcctgtcactgtcagttggaactctggagccttgacttctggtgttcatacatttcctgctgtccttcaaagcagcggcttgtactcattgtcttctgttgtgacagtaccctcaagcagcctcggcactcagacatacatctgcaatgtcaaccacaaaccctcaaatacaaaggtagataaaaaagtcgaaccaaagtcttgtgacaaaactcacacgtgcccaccgtgcccagcacctgaactcctggggggaccgtcagtcttcctcttccccccaaaacccaaggacaccctcatgatctcccggacccctgaggtcacatgcgtggtggtggacgtgagccacgaagaccctgaggtcaagttcaactggtacgtggacggcgtggaggtgcataatgccaagacaaagccgcgggaggagcagtacaacagcacgtaccgtgtggtcagcgtcctcaccgtcctgcaccaggactggctgaatggcaaggagtacaagtgcaaggtctccaacaaagccctcccagcccccatcgagaaaaccatctccaaagccaaagggcagccccgagaaccacaggtgtacaccctgcccccatgccgggaggagatgaccaagaaccaggtcagcctgtggtgcctggtcaaaggcttctatcccagcgacatcgccgtggagtgggagagcaatgggcagccggagaacaactacaagaccacgcctcccgtgctggactccgacggctccttcttcctctacagcaagctcaccgtggacaagagcaggtggcagcaggggaacgtcttctcatgctccgtgatgcatgaggctctgcacaaccactacacgcagaagagcctctccctgtctccgggtaaa

SEQ ID NO: 490 - DNA, 1725 bp, synthetic construct
  misc_feature 1..1725: note = nucleotide sequence coding TH-S-PHC-Knob
  source 1..1725: mol_type = other DNA
gaagttcaacttgtggagtctggaggcggtttggtacaacctggaggttcacttcgtttgtcatgtgctgcctctgggtttaatatcaaggatacttatattcattgggttcgccaggcacccggaaaagggctggaatgggtggcccgtatatatcccactaacggttacactcgatatgctgactctgtaaagggtcgatttactatatccgctgatactagcaaaaacactgcctacctccagatgaacagtctgcgcgccgaggatacagcagtttattattgttcccgatggggaggtgacgggttctatgccatggactactggggtcaagggacactggtaaccgtttcttctgctagcacaaaaggacctgaagtacagttggtggagtctggtggaggtcttgtacaacctggcgggagtttgcggctttcctgcgctgcaagcgggtttaccttcaccgattataccatggattgggtacgccaagcccctggtaagtgccttgagtgggttgccgatgtaaaccctaattccggaggaagtatctataatcaacgcttcaagggccgattcactctgagtgtggatcgaagcaagaacaccttgtacttgcagatgaattccttgcgggctgaagacacagccgtctattactgcgcccgaaatttggggccttcattctattttgactattggggtcagggaactctggtaactgtttcaagtgctagcaccaaaggacctagtgtttttcctcttgccccttcctcaaagtctacctctggggggacagccgctctgggctgcctggtcaaggattatttcccagagcctgtcactgtcagttggaactctggagccttgacttctggtgttcatacatttcctgctgtccttcaaagcagcggcttgtactcattgtcttctgttgtgacagtaccctcaagcagcctcggcactcagacatacatctgcaatgtcaaccacaaaccctcaaatacaaaggtagataaaaaagtcgaaccaaagtcttgtgacaaaactcacacgtgcccaccgtgcccagcacctgaactcctggggggaccgtcagtcttcctcttccccccaaaacccaaggacaccctcatgatctcccggacccctgaggtcacatgcgtggtggtggacgtgagccacgaagaccctgaggtcaagttcaactggtacgtggacggcgtggaggtgcataatgccaagacaaagccgcgggaggagcagtacaacagcacgtaccgtgtggtcagcgtcctcaccgtcctgcaccaggactggctgaatggcaaggagtacaagtgcaaggtctccaacaaagccctcccagcccccatcgagaaaaccatctccaaagccaaagggcagccccgagaaccacaggtgtacaccctgcccccatgccgggaggagatgaccaagaaccaggtcagcctgtggtgcctggtcaaaggcttctatcccagcgacatcgccgtggagtgggagagcaatgggcagccggagaacaactacaagaccacgcctcccgtgctggactccgacggctccttcttcctctacagcaagctcaccgtggacaagagcaggtggcagcaggggaacgtcttctcatgctccgtgatgcatgaggctctgcacaaccactacacgcagaagagcctctccctgtctccgggtaaa

SEQ ID NO: 491 - DNA, 1746 bp, synthetic construct
  misc_feature 1..1746: note = nucleotide sequence coding THC-S-PHC-Knob
  source 1..1746: mol_type = other DNA
gaagttcaacttgtggagtctggaggcggtttggtacaacctggaggttcacttcgtttgtcatgtgctgcctctgggtttaatatcaaggatacttatattcattgggttcgccaggcacccggaaaatgcctggaatgggtggcccgtatatatcccactaacggttacactcgatatgctgactctgtaaagggtcgatttactatatccgctgatactagcaaaaacactgcctacctccagatgaacagtctgcgcgccgaggatacagcagtttattattgttcccgatggggaggtgacgggttctatgccatggactactggggtcaagggacactggtaaccgtttcttctgctagcacaaaaggacctagtgttttcccactggctccagaagtacagttggtggagtctggtggaggtcttgtacaacctggcgggagtttgcggctttcctgcgctgcaagcgggtttaccttcaccgattataccatggattgggtacgccaagcccctggtaagtgccttgagtgggttgccgatgtaaaccctaattccggaggaagtatctataatcaacgcttcaagggccgattcactctgagtgtggatcgaagcaagaacaccttgtacttgcagatgaattccttgcgggctgaagacacagccgtctattactgcgcccgaaatttggggccttcattctattttgactattggggtcagggaactctggtaactgtttcaagtgctagcaccaaaggacctagtgtttttcctcttgccccttcctcaaagtctacctctggggggacagccgctctgggctgcctggtcaaggattatttcccagagcctgtcactgtcagttggaactctggagccttgacttctggtgttcatacatttcctgctgtccttcaaagcagcggcttgtactcattgtcttctgttgtgacagtaccctcaagcagcctcggcactcagacatacatctgcaatgtcaaccacaaaccctcaaatacaaaggtagataaaaaagtcgaaccaaagtcttgtgacaaaactcacacgtgcccaccgtgcccagcacctgaactcctggggggaccgtcagtcttcctcttccccccaaaacccaaggacaccctcatgatctcccggacccctgaggtcacatgcgtggtggtggacgtgagccacgaagaccctgaggtcaagttcaactggtacgtggacggcgtggaggtgcataatgccaagacaaagccgcgggaggagcagtacaacagcacgtaccgtgtggtcagcgtcctcaccgtcctgcaccaggactggctgaatggcaaggagtacaagtgcaaggtctccaacaaagccctcccagcccccatcgagaaaaccatctccaaagccaaagggcagccccgagaaccacaggtgtacaccctgcccccatgccgggaggagatgaccaagaaccaggtcagcctgtggtgcctggtcaaaggcttctatcccagcgacatcgccgtggagtgggagagcaatgggcagccggagaacaactacaagaccacgcctcccgtgctggactccgacggctccttcttcctctacagcaagctcaccgtggacaagagcaggtggcagcaggggaacgtcttctcatgctccgtgatgcatgaggctctgcacaaccactacacgcagaagagcctctccctgtctccgggtaaa

SEQ ID NO: 492 - DNA, 1746 bp, synthetic construct
  misc_feature 1..1746: note = nucleotide sequence coding TH-L-PH-Knob
  source 1..1746: mol_type = other DNA
gaagttcaacttgtggagtctggaggcggtttggtacaacctggaggttcacttcgtttgtcatgtgctgcctctgggtttaatatcaaggatacttatattcattgggttcgccaggcacccggaaaagggctggaatgggtggcccgtatatatcccactaacggttacactcgatatgctgactctgtaaagggtcgatttactatatccgctgatactagcaaaaacactgcctacctccagatgaacagtctgcgcgccgaggatacagcagtttattattgttcccgatggggaggtgacgggttctatgccatggactactggggtcaagggacactggtaaccgtttcttctgctagcacaaaaggacctagtgttttcccactggctccagaagtacagttggtggagtctggtggaggtcttgtacaacctggcgggagtttgcggctttcctgcgctgcaagcgggtttaccttcaccgattataccatggattgggtacgccaagcccctggtaagggccttgagtgggttgccgatgtaaaccctaattccggaggaagtatctataatcaacgcttcaagggccgattcactctgagtgtggatcgaagcaagaacaccttgtacttgcagatgaattccttgcgggctgaagacacagccgtctattactgcgcccgaaatttggggccttcattctattttgactattggggtcagggaactctggtaactgtttcaagtgctagcaccaaaggacctagtgtttttcctcttgccccttcctcaaagtctacctctggggggacagccgctctgggctgcctggtcaaggattatttcccagagcctgtcactgtcagttggaactctggagccttgacttctggtgttcatacatttcctgctgtccttcaaagcagcggcttgtactcattgtcttctgttgtgacagtaccctcaagcagcctcggcactcagacatacatctgcaatgtcaaccacaaaccctcaaatacaaaggtagataaaaaagtcgaaccaaagtcttgtgacaaaactcacacgtgcccaccgtgcccagcacctgaactcctggggggaccgtcagtcttcctcttccccccaaaacccaaggacaccctcatgatctcccggacccctgaggtcacatgcgtggtggtggacgtgagccacgaagaccctgaggtcaagttcaactggtacgtggacggcgtggaggtgcataatgccaagacaaagccgcgggaggagcagtacaacagcacgtaccgtgtggtcagcgtcctcaccgtcctgcaccaggactggctgaatggcaaggagtacaagtgcaaggtctccaacaaagccctcccagcccccatcgagaaaaccatctccaaagccaaagggcagccccgagaaccacaggtgtacaccctgcccccatgccgggaggagatgaccaagaaccaggtcagcctgtggtgcctggtcaaaggcttctatcccagcgacatcgccgtggagtgggagagcaatgggcagccggagaacaactacaagaccacgcctcccgtgctggactccgacggctccttcttcctctacagcaagctcaccgtggacaagagcaggtggcagcaggggaacgtcttctcatgctccgtgatgcatgaggctctgcacaaccactacacgcagaagagcctctccctgtctccgggtaaa

SEQ ID NO: 493 - DNA, 1746 bp, synthetic construct
  misc_feature 1..1746: note = nucleotide sequence coding THC-L-PH-Knob
  source 1..1746: mol_type = other DNA
gaagttcaacttgtggagtctggaggcggtttggtacaacctggaggttcacttcgtttgtcatgtgctgcctctgggtttaatatcaaggatacttatattcattgggttcgccaggcacccggaaaatgcctggaatgggtggcccgtatatatcccactaacggttacactcgatatgctgactctgtaaagggtcgatttactatatccgctgatactagcaaaaacactgcctacctccagatgaacagtctgcgcgccgaggatacagcagtttattattgttcccgatggggaggtgacgggttctatgccatggactactggggtcaagggacactggtaaccgtttcttctgctagcacaaaaggacctagtgttttcccactggctccagaagtacagttggtggagtctggtggaggtcttgtacaacctggcgggagtttgcggctttcctgcgctgcaagcgggtttaccttcaccgattataccatggattgggtacgccaagcccctggtaagggccttgagtgggttgccgatgtaaaccctaattccggaggaagtatctataatcaacgcttcaagggccgattcactctgagtgtggatcgaagcaagaacaccttgtacttgcagatgaattccttgcgggctgaagacacagccgtctattactgcgcccgaaatttggggccttcattctattttgactattggggtcagggaactctggtaactgtttcaagtgctagcaccaaaggacctagtgtttttcctcttgccccttcctcaaagtctacctctggggggacagccgctctgggctgcctggtcaaggattatttcccagagcctgtcactgtcagttggaactctggagccttgacttctggtgttcatacatttcctgctgtccttcaaagcagcggcttgtactcattgtcttctgttgtgacagtaccctcaagcagcctcggcactcagacatacatctgcaatgtcaaccacaaaccctcaaatacaaaggtagataaaaaagtcgaaccaaagtcttgtgacaaaactcacacgtgcccaccgtgcccagcacctgaactcctggggggaccgtcagtcttcctcttccccccaaaacccaaggacaccctcatgatctcccggacccctgaggtcacatgcgtggtggtggacgtgagccacgaagaccctgaggtcaagttcaactggtacgtggacggcgtggaggtgcataatgccaagacaaagccgcgggaggagcagtacaacagcacgtaccgtgtggtcagcgtcctcaccgtcctgcaccaggactggctgaatggcaaggagtacaagtgcaaggtctccaacaaagccctcccagcccccatcgagaaaaccatctccaaagccaaagggcagccccgagaaccacaggtgtacaccctgcccccatgccgggaggagatgaccaagaaccaggtcagcctgtggtgcctggtcaaaggcttctatcccagcgacatcgccgtggagtgggagagcaatgggcagccggagaacaactacaagaccacgcctcccgtgctggactccgacggctccttcttcctctacagcaagctcaccgtggacaagagcaggtggcagcaggggaacgtcttctcatgctccgtgatgcatgaggctctgcacaaccactacacgcagaagagcctctccctgtctccgggtaaa

SEQ ID NO: 494 - DNA, 1746 bp, synthetic construct
  misc_feature 1..1746: note = nucleotide sequence coding TH-L-PHC-Knob
  source 1..1746: mol_type = other DNA
gaagttcaacttgtggagtctggaggcggtttggtacaacctggaggttcacttcgtttgtcatgtgctgcctctgggtttaatatcaaggatacttatattcattgggttcgccaggcacccggaaaagggctggaatgggtggcccgtatatatcccactaacggttacactcgatatgctgactctgtaaagggtcgatttactatatccgctgatactagcaaaaacactgcctacctccagatgaacagtctgcgcgccgaggatacagcagtttattattgttcccgatggggaggtgacgggttctatgccatggactactggggtcaagggacactggtaaccgtttcttctgctagcacaaaaggacctagtgttttcccactggctccagaagtacagttggtggagtctggtggaggtcttgtacaacctggcgggagtttgcggctttcctgcgctgcaagcgggtttaccttcaccgattataccatggattgggtacgccaagcccctggtaagtgccttgagtgggttgccgatgtaaaccctaattccggaggaagtatctataatcaacgcttcaagggccgattcactctgagtgtggatcgaagcaagaacaccttgtacttgcagatgaattccttgcgggctgaagacacagccgtctattactgcgcccgaaatttggggccttcattctattttgactattggggtcagggaactctggtaactgtttcaagtgctagcaccaaaggacctagtgtttttcctcttgccccttcctcaaagtctacctctggggggacagccgctctgggctgcctggtcaaggattatttcccagagcctgtcactgtcagttggaactctggagccttgacttctggtgttcatacatttcctgctgtccttcaaagcagcggcttgtactcattgtcttctgttgtgacagtaccctcaagcagcctcggcactcagacatacatctgcaatgtcaaccacaaaccctcaaatacaaaggtagataaaaaagtcgaaccaaagtcttgtgacaaaactcacacgtgcccaccgtgcccagcacctgaactcctggggggaccgtcagtcttcctcttccccccaaaacccaaggacaccctcatgatctcccggacccctgaggtcacatgcgtggtggtggacgtgagccacgaagaccctgaggtcaagttcaactggtacgtggacggcgtggaggtgcataatgccaagacaaagccgcgggaggagcagtacaacagcacgtaccgtgtggtcagcgtcctcaccgtcctgcaccaggactggctgaatggcaaggagtacaagtgcaaggtctccaacaaagccctcccagcccccatcgagaaaaccatctccaaagccaaagggcagccccgagaaccacaggtgtacaccctgcccccatgccgggaggagatgaccaagaaccaggtcagcctgtggtgcctggtcaaaggcttctatcccagcgacatcgccgtggagtgggagagcaatgggcagccggagaacaactacaagaccacgcctcccgtgctggactccgacggctccttcttcctctacagcaagctcaccgtggacaagagcaggtggcagcaggggaacgtcttctcatgctccgtgatgcatgaggctctgcacaaccactacacgcagaagagcctctccctgtctccgggtaaa

SEQ ID NO: 495 - DNA, 1746 bp, synthetic construct; identical to SEQ ID NO: 491
  misc_feature 1..1746: note = nucleotide sequence coding THC-L-PHC-Knob
  source 1..1746: mol_type = other DNA

SEQ ID NO: 496 - DNA, 1722 bp, synthetic construct
  misc_feature 1..1722: note = nucleotide sequence coding TL-S-PL-Knob
  source 1..1722: mol_type = other DNA
gacattcagatgacccaatccccctctagcctttcagcctccgtaggggacagagttacaataacctgtagggctagtcaggacgttaatacagcagtcgcatggtaccagcagaagcccggtaaggctcctaagcttttgatctacagtgcttctttcctgtattctggtgtacctagccgattctcaggctctcggagtggcacagacttcactctgacaatttcaagtctccagccagaagattttgcaacctactactgccaacaacactacactactcctccaaccttcggacagggcacaaaagtagagattaagcgtacggtggctgctccagatattcaaatgacccaaagtccaagttccctttcagcatctgtcggtgatcgagtcactataacttgtaaggccagccaagacgttagcataggagtagcatggtaccaacaaaagcctgggaaggctcccaaacttctcatttattctgcttcctaccgatatactggtgtcccaagtagattttctggcagcggatctggaactgattttacattgactatcagctccctccagcctgaggacttcgctacttattactgccaacagtactacatttatccctatacattcggtcaagggaccaaagtagagatcaaacgtacggtggcagctcccagcgtttttatctttcccccatccgacgagcagctcaagagtggcactgcctctgtagtttgtttgctgaataacttctatccacgtgaagcaaaagtacagtggaaggtcgataatgcccttcagagcggtaacagccaagaaagtgttaccgagcaagattccaaagattccacttacagtctgtccagcacattgacactgagtaaggctgattacgaaaaacacaaggtgtacgcatgcgaggtgacacaccaaggtctttcatctcctgtaactaagagctttaaccggggagaatgtggtggtgggggcagcgggggcggaggtagtggaggcggcggtagtgaaccaaagagtagtgacaaaactcacacgtgcccaccgtgcccagcacctgaactcctggggggaccgtcagtcttcctcttccccccaaaacccaaggacaccctcatgatctcccggacccctgaggtcacatgcgtggtggtggacgtgagccacgaagaccctgaggtcaagttcaactggtacgtggacggcgtggaggtgcataatgccaagacaaagccgcgggaggagcagtacaacagcacgtaccgtgtggtcagcgtcctcaccgtcctgcaccaggactggctgaatggcaaggagtacaagtgcaaggtctccaacaaagccctcccagcccccatcgagaaaaccatctccaaagccaaagggcagccccgagaaccacaggtgtacaccctgcccccatgccgggaggagatgaccaagaaccaggtcagcctgtggtgcctggtcaaaggcttctatcccagcgacatcgccgtggagtgggagagcaatgggcagccggagaacaactacaagaccacgcctcccgtgctggactccgacggctccttcttcctctacagcaagctcaccgtggacaagagcaggtggcagcaggggaacgtcttctcatgctccgtgatgcatgaggctctgcacaaccactacacgcagaagagcctctccctgtctccgggtaaa

SEQ ID NO: 497 - DNA, 1722 bp, synthetic construct
  misc_feature 1..1722: note = nucleotide sequence coding TLC-S-PL-Knob
  source 1..1722: mol_type = other DNA
gacattcagatgacccaatccccctctagcctttcagcctccgtaggggacagagttacaataacctgtagggctagtcaggacgttaatacagcagtcgcatggtaccagcagaagcccggtaaggctcctaagcttttgatctacagtgcttctttcctgtattctggtgtacctagccgattctcaggctctcggagtggcacagacttcactctgacaatttcaagtctccagccagaagattttgcaacctactactgccaacaacactacactactcctccaaccttcggatgtggcacaaaagtagagattaagcgtacggtggctgctccagatattcaaatgacccaaagtccaagttccctttcagcatctgtcggtgatcgagtcactataacttgtaaggccagccaagacgttagcataggagtagcatggtaccaacaaaagcctgggaaggctcccaaacttctcatttattctgcttcctaccgatatactggtgtcccaagtagattttctggcagcggatctggaactgattttacattgactatcagctccctccagcctgaggacttcgctacttattactgccaacagtactacatttatccctatacattcggtcaagggaccaaagtagagatcaaacgtacggtggcagctcccagcgtttttatctttcccccatccgacgagcagctcaagagtggcactgcctctgtagtttgtttgctgaataacttctatccacgtgaagcaaaagtacagtggaaggtcgataatgcccttcagagcggtaacagccaagaaagtgttaccgagcaagattccaaagattccacttacagtctgtccagcacattgacactgagtaaggctgattacgaaaaacacaaggtgtacgcatgcgaggtgacacaccaaggtctttcatctcctgtaactaagagctttaaccggggagaatgtggtggtgggggcagcgggggcggaggtagtggaggcggcggtagtgaaccaaagagtagtgacaaaactcacacgtgcccaccgtgcccagcacctgaactcctggggggaccgtcagtcttcctcttccccccaaaacccaaggacaccctcatgatctcccggacccctgaggtcacatgcgtggtggtggacgtgagccacgaagaccctgaggtcaagttcaactggtacgtggacggcgtggaggtgcataatgccaagacaaagccgcgggaggagcagtacaacagcacgtaccgtgtggtcagcgtcctcaccgtcctgcaccaggactggctgaatggcaaggagtacaagtgcaaggtctccaacaaagccctcccagcccccatcgagaaaaccatctccaaagccaaagggcagccccgagaaccacaggtgtacaccctgcccccatgccgggaggagatgaccaagaaccaggtcagcctgtggtgcctggtcaaaggcttctatcccagcgacatcgccgtggagtgggagagcaatgggcagccggagaacaactacaagaccacgcctcccgtgctggactccgacggctccttcttcctctacagcaagctcaccgtggacaagagcaggtggcagcaggggaacgtcttctcatgctccgtgatgcatgaggctctgcacaaccactacacgcagaagagcctctccctgtctccgggtaaa

SEQ ID NO: 498 - DNA, 1722 bp, synthetic construct
  misc_feature 1..1722: note = nucleotide sequence coding TL-S-PLC-Knob
  source 1..1722: mol_type = other DNA
gacattcagatgacccaatccccctctagcctttcagcctccgtaggggacagagttacaataacctgtagggctagtcaggacgttaatacagcagtcgcatggtaccagcagaagcccggtaaggctcctaagcttttgatctacagtgcttctttcctgtattctggtgtacctagccgattctcaggctctcggagtggcacagacttcactctgacaatttcaagtctccagccagaagattttgcaacctactactgccaacaacactacactactcctccaaccttcggacagggcacaaaagtagagattaagcgtacggtggctgctccagatattcaaatgacccaaagtccaagttccctttcagcatctgtcggtgatcgagtcactataacttgtaaggccagccaagacgttagcataggagtagcatggtaccaacaaaagcctgggaaggctcccaaacttctcatttattctgcttcctaccgatatactggtgtcccaagtagattttctggcagcggatctggaactgattttacattgactatcagctccctccagcctgaggacttcgctacttattactgccaacagtactacatttatccctatacattcggttgtgggaccaaagtagagatcaaacgtacggtggcagctcccagcgtttttatctttcccccatccgacgagcagctcaagagtggcactgcctctgtagtttgtttgctgaataacttctatccacgtgaagcaaaagtacagtggaaggtcgataatgcccttcagagcggtaacagccaagaaagtgttaccgagcaagattccaaagattccacttacagtctgtccagcacattgacactgagtaaggctgattacgaaaaacacaaggtgtacgcatgcgaggtgacacaccaaggtctttcatctcctgtaactaagagctttaaccggggagaatgtggtggtgggggcagcgggggcggaggtagtggaggcggcggtagtgaaccaaagagtagtgacaaaactcacacgtgcccaccgtgcccagcacctgaactcctggggggaccgtcagtcttcctcttccccccaaaacccaaggacaccctcatgatctcccggacccctgaggtcacatgcgtggtggtggacgtgagccacgaagaccctgaggtcaagttcaactggtacgtggacggcgtggaggtgcataatgccaagacaaagccgcgggaggagcagtacaacagcacgtaccgtgtggtcagcgtcctcaccgtcctgcaccaggactggctgaatggcaaggagtacaagtgcaaggtctccaacaaagccctcccagcccccatcgagaaaaccatctccaaagccaaagggcagccccgagaaccacaggtgtacaccctgcccccatgccgggaggagatgaccaagaaccaggtcagcctgtggtgcctggtcaaaggcttctatcccagcgacatcgccgtggagtgggagagcaatgggcagccggagaacaactacaagaccacgcctcccgtgctggactccgacggctccttcttcctctacagcaagctcaccgtggacaagagcaggtggcagcaggggaacgtcttctcatgctccgtgatgcatgaggctctgcacaaccactacacgcagaagagcctctccctgtctccgggtaaa

SEQ ID NO: 499 - DNA, 1722 bp, synthetic construct
  misc_feature 1..1722: note = nucleotide sequence coding TLC-S-PLC-Knob
  source 1..1722: mol_type = other DNA
gacattcagatgacccaatccccctctagcctttcagcctccgtaggggacagagttacaataacctgtagggctagtcaggacgttaatacagcagtcgcatggtaccagcagaagcccggtaaggctcctaagcttttgatctacagtgcttctttcctgtattctggtgtacctagccgattctcaggctctcggagtggcacagacttcactctgacaatttcaagtctccagccagaagattttgcaacctactactgccaacaacactacactactcctccaaccttcggatgtggcacaaaagtagagattaagcgtacggtggctgctccagatattcaaatgacccaaagtccaagttccctttcagcatctgtcggtgatcgagtcactataacttgtaaggccagccaagacgttagcataggagtagcatggtaccaacaaaagcctgggaaggctcccaaacttctcatttattctgcttcctaccgatatactggtgtcccaagtagattttctggcagcggatctggaactgattttacattgactatcagctccctccagcctgaggacttcgctacttattactgccaacagtactacatttatccctatacattcggttgtgggaccaaagtagagatcaaacgtacggtggcagctcccagcgtttttatctttcccccatccgacgagcagctcaagagtggcactgcctctgtagtttgtttgctgaataacttctatccacgtgaagcaaaagtacagtggaaggtcgataatgcccttcagagcggtaacagccaagaaagtgttaccgagcaagattccaaagattccacttacagtctgtccagcacattgacactgagtaaggctgattacgaaaaacacaaggtgtacgcatgcgaggtgacacaccaaggtctttcatctcctgtaactaagagctttaaccggggagaatgtggtggtgggggcagcgggggcggaggtagtggaggcggcggtagtgaaccaaagagtagtgacaaaactcacacgtgcccaccgtgcccagcacctgaactcctggggggaccgtcagtcttcctcttccccccaaaacccaaggacaccctcatgatctcccggacccctgaggtcacatgcgtggtggtggacgtgagccacgaagaccctgaggtcaagttcaactggtacgtggacggcgtggaggtgcataatgccaagacaaagccgcgggaggagcagtacaacagcacgtaccgtgtggtcagcgtcctcaccgtcctgcaccaggactggctgaatggcaaggagtacaagtgcaaggtctccaacaaagccctcccagcccccatcgagaaaaccatctccaaagccaaagggcagccccgagaaccacaggtgtacaccctgcccccatgccgggaggagatgaccaagaaccaggtcagcctgtggtgcctggtcaaaggcttctatcccagcgacatcgccgtggagtgggagagcaatgggcagccggagaacaactacaagaccacgcctcccgtgctggactccgacggctccttcttcctctacagcaagctcaccgtggacaagagcaggtggcagcaggggaacgtcttctcatgctccgtgatgcatgaggctctgcacaaccactacacgcagaagagcctctccctgtctccgggtaaa

SEQ ID NO: 500 - DNA, 1743 bp, synthetic construct
  misc_feature 1..1743: note = nucleotide sequence coding TL-L-PL-Knob
  source 1..1743: mol_type = other DNA
gacattcagatgacccaatccccctctagcctttcagcctccgtaggggacagagttacaataacctgtagggctagtcaggacgttaatacagcagtcgcatggtaccagcagaagcccggtaaggctcctaagcttttgatctacagtgcttctttcctgtattctggtgtacctagccgattctcaggctctcggagtggcacagacttcactctgacaatttcaagtctccagccagaagattttgcaacctactactgccaacaacactacactactcctccaaccttcggacagggcacaaaagtagagattaagcgtacggtggctgctccatccgtttttatctttcccccagatattcaaatgacccaaagtccaagttccctttcagcatctgtcggtgatcgagtcactataacttgtaaggccagccaagacgttagcataggagtagcatggtaccaacaaaagcctgggaaggctcccaaacttctcatttattctgcttcctaccgatatactggtgtcccaagtagattttctggcagcggatctggaactgattttacattgactatcagctccctccagcctgaggacttcgctacttattactgccaacagtactacatttatccctatacattcggtcaagggaccaaagtagagatcaaacgtacggtggcagctcccagcgtttttatctttcccccatccgacgagcagctcaagagtggcactgcctctgtagtttgtttgctgaataacttctatccacgtgaagcaaaagtacagtggaaggtcgataatgcccttcagagcggtaacagccaagaaagtgttaccgagcaagattccaaagattccacttacagtctgtccagcacattgacactgagtaaggctgattacgaaaaacacaaggtgtacgcatgcgaggtgacacaccaaggtctttcatctcctgtaactaagagctttaaccggggagaatgtggtggtgggggcagcgggggcggaggtagtggaggcggcggtagtgaaccaaagagtagtgacaaaactcacacgtgcccaccgtgcccagcacctgaactcctggggggaccgtcagtcttcctcttccccccaaaacccaaggacaccctcatgatctcccggacccctgaggtcacatgcgtggtggtggacgtgagccacgaagaccctgaggtcaagttcaactggtacgtggacggcgtggaggtgcataatgccaagacaaagccgcgggaggagcagtacaacagcacgtaccgtgtggtcagcgtcctcaccgtcctgcaccaggactggctgaatggcaaggagtacaagtgcaaggtctccaacaaagccctcccagcccccatcgagaaaaccatctccaaagccaaagggcagccccgagaaccacaggtgtacaccctgcccccatgccgggaggagatgaccaagaaccaggtcagcctgtggtgcctggtcaaaggcttctatcccagcgacatcgccgtggagtgggagagcaatgggcagccggagaacaactacaagaccacgcctcccgtgctggactccgacggctccttcttcctctacagcaagctcaccgtggacaagagcaggtggcagcaggggaacgtcttctcatgctccgtgatgcatgaggctctgcacaaccactacacgcagaagagcctctccctgtctccgggtaaa

SEQ ID NO: 501 - DNA, 1743 bp, synthetic construct
  misc_feature 1..1743: note = nucleotide sequence coding TLC-L-PL-Knob
  source 1..1743: mol_type = other DNA
gacattcagatgacccaatccccctctagcctttcagcctccgtaggggacagagttacaataacctgtagggctagtcaggacgttaatacagcagtcgcatggtaccagcagaagcccggtaaggctcctaagcttttgatctacagtgcttctttcctgtattctggtgtacctagccgattctcaggctctcggagtggcacagacttcactctgacaatttcaagtctccagccagaagattttgcaacctactactgccaacaacactacactactcctccaaccttcggatgtggcacaaaagtagagattaagcgtacggtggctgctccatccgtttttatctttcccccagatattcaaatgacccaaagtccaagttccctttcagcatctgtcggtgatcgagtcactataacttgtaaggccagccaagacgttagcataggagtagcatggtaccaacaaaagcctgggaaggctcccaaacttctcatttattctgcttcctaccgatatactggtgtcccaagtagattttctggcagcggatctggaactgattttacattgactatcagctccctccagcctgaggacttcgctacttattactgccaacagtactacatttatccctatacattcggtcaagggaccaaagtagagatcaaacgtacggtggcagctcccagcgtttttatctttcccccatccgacgagcagctcaagagtggcactgcctctgtagtttgtttgctgaataacttctatccacgtgaagcaaaagtacagtggaaggtcgataatgcccttcagagcggtaacagccaagaaagtgttaccgagcaagattccaaagattccacttacagtctgtccagcacattgacactgagtaaggctgattacgaaaaacacaaggtgtacgcatgcgaggtgacacaccaaggtctttcatctcctgtaactaagagctttaaccggggagaatgtggtggtgggggcagcgggggcggaggtagtggaggcggcggtagtgaaccaaagagtagtgacaaaactcacacgtgcccaccgtgcccagcacctgaactcctggggggaccgtcagtcttcctcttccccccaaaacccaaggacaccctcatgatctcccggacccctgaggtcacatgcgtggtggtggacgtgagccacgaagaccctgaggtcaagttcaactggtacgtggacggcgtggaggtgcataatgccaagacaaagccgcgggaggagcagtacaacagcacgtaccgtgtggtcagcgtcctcaccgtcctgcaccaggactggctgaatggcaaggagtacaagtgcaaggtctccaacaaagccctcccagcccccatcgagaaaaccatctccaaagccaaagggcagccccgagaaccacaggtgtacaccctgcccccatgccgggaggagatgaccaagaaccaggtcagcctgtggtgcctggtcaaaggcttctatcccagcgacatcgccgtggagtgggagagcaatgggcagccggagaacaactacaagaccacgcctcccgtgctggactccgacggctccttcttcctctacagcaagctcaccgtggacaagagcaggtggcagcaggggaacgtcttctcatgctccgtgatgcatgaggctctgcacaaccactacacgcagaagagcctctccctgtctccgggtaaa

SEQ ID NO: 502 - DNA, 1743 bp, synthetic construct
  misc_feature 1..1743: note = nucleotide sequence coding TL-L-PLC-Knob
  source 1..1743: mol_type = other DNA
gacattcagatgacccaatccccctctagcctttcagcctccgtaggggacagagttacaataacctgtagggctagtcaggacgttaatacagcagtcgcatggtaccagcagaagcccggtaaggctcctaagcttttgatctacagtgcttctttcctgtattctggtgtacctagccgattctcaggctctcggagtggcacagacttcactctgacaatttcaagtctccagccagaagattttgcaacctactactgccaacaacactacactactcctccaaccttcggacagggcacaaaagtagagattaagcgtacggtggctgctccatccgtttttatctttcccccagatattcaaatgacccaaagtccaagttccctttcagcatctgtcggtgatcgagtcactataacttgtaaggccagccaagacgttagcataggagtagcatggtaccaacaaaagcctgggaaggctcccaaacttctcatttattctgcttcctaccgatatactggtgtcccaagtagattttctggcagcggatctggaactgattttacattgactatcagctccctccagcctgaggacttcgctacttattactgccaacagtactacatttatccctatacattcggttgtgggaccaaagtagagatcaaacgtacggtggcagctcccagcgtttttatctttcccccatccgacgagcagctcaagagtggcactgcctctgtagtttgtttgctgaataacttctatccacgtgaagcaaaagtacagtggaaggtcgataatgcccttcagagcggtaacagccaagaaagtgttaccgagcaagattccaaagattccacttacagtctgtccagcacattgacactgagtaaggctgattacgaaaaacacaaggtgtacgcatgcgaggtgacacaccaaggtctttcatctcctgtaactaagagctttaaccggggagaatgtggtggtgggggcagcgggggcggaggtagtggaggcggcggtagtgaaccaaagagtagtgacaaaactcacacgtgcccaccgtgcccagcacctgaactcctggggggaccgtcagtcttcctcttccccccaaaacccaaggacaccctcatgatctcccggacccctgaggtcacatgcgtggtggtggacgtgagccacgaagaccctgaggtcaagttcaactggtacgtggacggcgtggaggtgcataatgccaagacaaagccgcgggaggagcagtacaacagcacgtaccgtgtggtcagcgtcctcaccgtcctgcaccaggactggctgaatggcaaggagtacaagtgcaaggtctccaacaaagccctcccagcccccatcgagaaaaccatctccaaagccaaagggcagccccgagaaccacaggtgtacaccctgcccccatgccgggaggagatgaccaagaaccaggtcagcctgtggtgcctggtcaaaggcttctatcccagcgacatcgccgtggagtgggagagcaatgggcagccggagaacaactacaagaccacgcctcccgtgctggactccgacggctccttcttcctctacagcaagctcaccgtggacaagagcaggtggcagcaggggaacgtcttctcatgctccgtgatgcatgaggctctgcacaaccactacacgcagaagagcctctccctgtctccgggtaaa

SEQ ID NO: 503 - DNA, 1743 bp, synthetic construct
  misc_feature 1..1743: note = nucleotide sequence coding TLC-L-PLC-Knob
  source 1..1743: mol_type = other DNA
gacattcagatgacccaatccccctctagcctttcagcctccgtaggggacagagttacaataacctgtagggctagtcaggacgttaatacagcagtcgcatggtaccagcagaagcccggtaaggctcctaagcttttgatctacagtgcttctttcctgtattctggtgtacctagccgattctcaggctctcggagtggcacagacttcactctgacaatttcaagtctccagccagaagattttgcaacctactactgccaacaacactacactactcctccaaccttcggatgtggcacaaaagtagagattaagcgtacggtggctgctccatccgtttttatctttcccccagatattcaaatgacccaaagtccaagttccctttcagcatctgtcggtgatcgagtcactataacttgtaaggccagccaagacgttagcataggagtagcatggtaccaacaaaagcctgggaaggctcccaaacttctcatttattctgcttcctaccgatatactggtgtcccaagtagattttctggcagcggatctggaactgattttacattgactatcagctccctccagcctgaggacttcgctacttattactgccaacagtactacatttatccctatacattcggttgtgggaccaaagtagagatcaaacgtacggtggcagctcccagcgtttttatctttcccccatccgacgagcagctcaagagtggcactgcctctgtagtttgtttgctgaataacttctatccacgtgaagcaaaagtacagtggaaggtcgataatgcccttcagagcggtaacagccaagaaagtgttaccgagcaagattccaaagattccacttacagtctgtccagcacattgacactgagtaaggctgattacgaaaaacacaaggtgtacgcatgcgaggtgacacaccaaggtctttcatctcctgtaactaagagctttaaccggggagaatgtggtggtgggggcagcgggggcggaggtagtggaggcggcggtagtgaaccaaagagtagtgacaaaactcacacgtgcccaccgtgcccagcacctgaactcctggggggaccgtcagtcttcctcttccccccaaaacccaaggacaccctcatgatctcccggacccctgaggtcacatgcgtggtggtggacgtgagccacgaagaccctgaggtcaagttcaactggtacgtggacggcgtggaggtgcataatgccaagacaaagccgcgggaggagcagtacaacagcacgtaccgtgtggtcagcgtcctcaccgtcctgcaccaggactggctgaatggcaaggagtacaagtgcaaggtctccaacaaagccctcccagcccccatcgagaaaaccatctccaaagccaaagggcagccccgagaaccacaggtgtacaccctgcccccatgccgggaggagatgaccaagaaccaggtcagcctgtggtgcctggtcaaaggcttctatcccagcgacatcgccgtggagtgggagagcaatgggcagccggagaacaactacaagaccacgcctcccgtgctggactccgacggctccttcttcctctacagcaagctcaccgtggacaagagcaggtggcagcaggggaacgtcttctcatgctccgtgatgcatgaggctctgcacaaccactacacgcagaagagcctctccctgtctccgggtaaa

SEQ ID NO: 504 - DNA, 1332 bp, synthetic construct
  misc_feature 1..1332: note = nucleotide sequence coding GPM01 HC
  source 1..1332: mol_type = other DNA
gaagttcagcttgtcgaaagtggcggaggtcttgtaaagccaggagggtccctgaagttgagttgtgctgcctctggcttcaccttttcacggtatgccatgtcctgggttcgacagatacctgagaagtgtcttgaatgggtggccgcaatagacagtagcggtggtgacacctattacctcgacacagtcaaagaccgctttactatctcacgcgataacgccaacaataccctgcacttgcagatgcgatcacttcgttcagaagacactgctctttactattgtgtacgccaagggggagcatactggggtcagggaacactggttaccgtgtcttcagctagcaccaaaggacctagtgtttttcctcttgccccttcctcaaagtctacctctggggggacagccgctctgggctgcctggtcaaggattatttcccagagcctgtcactgtcagttggaactctggagccttgacttctggtgttcatacatttcctgctgtccttcaaagcagcggcttgtactcattgtcttctgttgtgacagtaccctcaagcagcctcggcactcagacatacatctgcaatgtcaaccacaaaccctcaaatacaaaggtagataaaaaagtcgaaccaaagtcttgtgacaaaactcacacgtgcccaccgtgcccagcacctgaactcctggggggaccgtcagtcttcctcttccccccaaaacccaaggacaccctcatgatctcccggacccctgaggtcacatgcgtggtggtggacgtgagccacgaagaccctgaggtcaagttcaactggtacgtggacggcgtggaggtgcataatgccaagacaaagccgcgggaggagcagtacaacagcacgtaccgtgtggtcagcgtcctcaccgtcctgcaccaggactggctgaatggcaaggagtacaagtgcaaggtctccaacaaagccctcccagcccccatcgagaaaaccatctccaaagccaaagggcagccccgagaaccacaggtgtacaccctgcccccatgccgggaggagatgaccaagaaccaggtcagcctgtggtgcctggtcaaaggcttctatcccagcgacatcgccgtggagtgggagagcaatgggcagccggagaacaactacaagaccacgcctcccgtgctggactccgacggctccttcttcctctacagcaagctcaccgtggacaagagcaggtggcagcaggggaacgtcttctcatgctccgtgatgcatgaggctctgcacaaccactacacgcagaagagcctctccctgtctccgggtaaa

SEQ ID NO: 505 - DNA, 1398 bp, synthetic construct
  misc_feature 1..1398: note = nucleotide sequence coding GPM01 LC
  source 1..1398: mol_type = other DNA
gacgtggttatgactcagactcctctgactctctccgtcactattggtcagcccgcttccatatcatgtaaatcatcacaatctcttcttgatagcgatggcaagacttatttgaactggttgttgcaacgcccaggtcagagccctaagagacttatctatttggtgagcaaactcgacagcggtgcacccgatcgttttaccggaagcggcagcggcaccgatttcacactgaagatcagtagggtcgaagctgaagacctgggaatctactactgctggcaaggtactcactttcccctgactttcggctgcggtactaaacttgagatcaaacgtacggtggcagctcccagcgtttttatctttcccccatccgacgagcagctcaagagtggcactgcctctgtagtttgtttgctgaataacttctatccacgtgaagcaaaagtacagtggaaggtcgataatgcccttcagagcggtaacagccaagaaagtgttaccgagcaagattccaaagattccacttacagtctgtccagcacattgacactgagtaaggctgattacgaaaaacacaaggtgtacgcatgcgaggtgacacaccaaggtctttcatctcctgtaactaagagctttaaccggggagaatgtggtggtgggggcagcgggggcggaggtagtggaggcggcggtagtgaaccaaagagtagtgacaaaactcacacgtgcccaccgtgcccagcacctgaactcctggggggaccgtcagtcttcctcttccccccaaaacccaaggacaccctcatgatctcccggacccctgaggtcacatgcgtggtggtggacgtgagccacgaagaccctgaggtcaagttcaactggtacgtggacggcgtggaggtgcataatgccaagacaaagccgcgggaggagcagtacaacagcacgtaccgtgtggtcagcgtcctcaccgtcctgcaccaggactggctgaatggcaaggagtacaagtgcaaggtctccaacaaagccctcccagcccccatcgagaaaaccatctccaaagccaaagggcagccccgagaaccacaggtgtacaccctgcccccatgccgggaggagatgaccaagaaccaggtcagcctgtggtgcctggtcaaaggcttctatcccagcgacatcgccgtggagtgggagagcaatgggcagccggagaacaactacaagaccacgcctcccgtgctggactccgacggctccttcttcctctacagcaagctcaccgtggacaagagcaggtggcagcaggggaacgtcttctcatgctccgtgatgcatgaggctctgcacaaccactacacgcagaagagcctctccctgtctccgggtaaa

SEQ ID NO: 506 - DNA, 1335 bp, synthetic construct
  misc_feature 1..1335: note = nucleotide sequence coding GPM02 HC
  source 1..1335: mol_type = other DNA
caggttcagcttgtgcaatcaggcgctgaagtcaaaaaaccaggagcaagcgtgaaagtaagctgtaaggcttccggttacactttcaccgattacgaaatgcactgggtacgccaggctcctggacaatgtctggaatggatgggcgcacttgatccaaaaacaggtgacactgcttacagtcaaaaattcaaaggtcgtgtcactcttacagcagataagtccaccagtaccgcttatatggagcttagctccctgacttccgaggacaccgccgtgtattattgtacaagattctactcatatacttactggggccaaggaaccctggtgacagtgtcatctgctagcaccaaaggacctagtgtttttcctcttgccccttcctcaaagtctacctctggggggacagccgctctgggctgcctggtcaaggattatttcccagagcctgtcactgtcagttggaactctggagccttgacttctggtgttcatacatttcctgctgtccttcaaagcagcggcttgtactcattgtcttctgttgtgacagtaccctcaagcagcctcggcactcagacatacatctgcaatgtcaaccacaaaccctcaaatacaaaggtagataaaaaagtcgaaccaaagtcttgtgacaaaactcacacgtgcccaccgtgcccagcacctgaactcctggggggaccgtcagtcttcctcttccccccaaaacccaaggacaccctcatgatctcccggacccctgaggtcacatgcgtggtggtggacgtgagccacgaagaccctgaggtcaagttcaactggtacgtggacggcgtggaggtgcataatgccaagacaaagccgcgggaggagcagtacaacagcacgtaccgtgtggtcagcgtcctcaccgtcctgcaccaggactggctgaatggcaaggagtacaagtgcaaggtctccaacaaagccctcccagcccccatcgagaaaaccatctccaaagccaaagggcagccccgagaaccacaggtgtacaccctgcccccatgccgggaggagatgaccaagaaccaggtcagcctgtggtgcctggtcaaaggcttctatcccagcgacatcgccgtggagtgggagagcaatgggcagccggagaacaactacaagaccacgcctcccgtgctggactccgacggctccttcttcctctacagcaagctcaccgtggacaagagcaggtggcagcaggggaacgtcttctcatgctccgtgatgcatgaggctctgcacaaccactacacgcagaagagcctctccctgtctccgggtaaa

SEQ ID NO: 507 - DNA, 1398 bp, synthetic construct
  misc_feature 1..1398: note = nucleotide sequence coding GPM02 LC
  source 1..1398: mol_type = other DNA
gatgttgttatgactcagtcacctctctcacttcctgtaacccctggtgaaccagcctctataagctgccggtcaagtcaaagcctggttcatagcaaccgtaacacttaccttcactggtacttgcaaaaacctggtcagtccccacaactcttgatctacaaagtctccaatcgcttctctggagtccctgacaggttttctggtagtggatcaggtacagacttcactttgaaaatcagccgcgttgaggccgaggacgtgggagtgtattattgctctcagaatacccatgtacccccaacctttggctgtgggactaaactcgagattaaacgtacggtggcagctcccagcgtttttatctttcccccatccgacgagcagctcaagagtggcactgcctctgtagtttgtttgctgaataacttctatccacgtgaagcaaaagtacagtggaaggtcgataatgcccttcagagcggtaacagccaagaaagtgttaccgagcaagattccaaagattccacttacagtctgtccagcacattgacactgagtaaggctgattacgaaaaacacaaggtgtacgcatgcgaggtgacacaccaaggtctttcatctcctgtaactaagagctttaaccggggagaatgtggtggtgggggcagcgggggcggaggtagtggaggcggcggtagtgaaccaaagagtagtgacaaaactcacacgtgcccaccgtgcccagcacctgaactcctggggggaccgtcagtcttcctcttccccccaaaacccaaggacaccctcatgatctcccggacccctgaggtcacatgcgtggtggtggacgtgagccacgaagaccctgaggtcaagttcaactggtacgtggacggcgtggaggtgcataatgccaagacaaagccgcgggaggagcagtacaacagcacgtaccgtgtggtcagcgtcctcaccgtcctgcaccaggactggctgaatggcaaggagtacaagtgcaaggtctccaacaaagccctcccagcccccatcgagaaaaccatctccaaagccaaagggcagccccgagaaccacaggtgtacaccctgcccccatgccgggaggagatgaccaagaaccaggtcagcctgtggtgcctggtcaaaggcttctatcccagcgacatcgccgtggagtgggagagcaatgggcagccggagaacaactacaagaccacgcctcccgtgctggactccgacggctccttcttcctctacagcaagctcaccgtggacaagagcaggtggcagcaggggaacgtcttctcatgctccgtgatgcatgaggctctgcacaaccactacacgcagaagagcctctccctgtctccgggtaaa

SEQ ID NO: 508 - DNA, 1359 bp, synthetic construct
  misc_feature 1..1359: note = nucleotide sequence coding GPM04 HC
  source 1..1359: mol_type = other DNA
gaagtgcaactggtcgaaacaggcgggggactggtacagcccaagggatctttgaaacttagttgtgctgctagtgggtttacattcaatgcctccgcaatgaactgggtaagacaagctcctggcaagtgcctggaatgggtggcccgtattcgctctaaaagtaataactacgctatttattacgctgattctgtaaaggatcggtttacaataagtcgggacgacagccaatccatgctgtatctccaaatgaataacctgaaaacagaggatactgccatgtactattgtgtgcgggacccaggctattacgggaatccctggttcgcctattggggacagggcactctggttaccgtatcatcagctagcaccaaaggacctagtgtttttcctcttgccccttcctcaaagtctacctctggggggacagccgctctgggctgcctggtcaaggattatttcccagagcctgtcactgtcagttggaactctggagccttgacttctggtgttcatacatttcctgctgtccttcaaagcagcggcttgtactcattgtcttctgttgtgacagtaccctcaagcagcctcggcactcagacatacatctgcaatgtcaaccacaaaccctcaaatacaaaggtagataaaaaagtcgaaccaaagtcttgtgacaaaactcacacgtgcccaccgtgcccagcacctgaactcctggggggaccgtcagtcttcctcttccccccaaaacccaaggacaccctcatgatctcccggacccctgaggtcacatgcgtggtggtggacgtgagccacgaagaccctgaggtcaagttcaactggtacgtggacggcgtggaggtgcataatgccaagacaaagccgcgggaggagcagtacaacagcacgtaccgtgtggtcagcgtcctcaccgtcctgcaccaggactggctgaatggcaaggagtacaagtgcaaggtctccaacaaagccctcccagcccccatcgagaaaaccatctccaaagccaaagggcagccccgagaaccacaggtgtacaccctgcccccatgccgggaggagatgaccaagaaccaggtcagcctgtggtgcctggtcaaaggcttctatcccagcgacatcgccgtggagtgggagagcaatgggcagccggagaacaactacaagaccacgcctcccgtgctggactccgacggctccttcttcctctacagcaagctcaccgtggacaagagcaggtggcagcaggggaacgtcttctcatgctccgtgatgcatgaggctctgcacaaccactacacgcagaagagcctctccctgtctccgggtaaa

SEQ ID NO: 509 - DNA, 1380 bp, synthetic construct
  misc_feature 1..1380: note = nucleotide sequence coding GPM04 LC
  source 1..1380: mol_type = other DNA
caaattgtcctcacccaatcaccagctataatgtctgcttttcccggcgagaaagtaaccatgacttgtagcgcctctagtagcgtgtcatatatgtattggtatcaacaaaagagcggtagttcacctcgactccttatctacgacacaagtaatctcgctagtggtgtcccagtccgtttctccgggagcggcagcggcacatcatactccctgaccatctccagaatggaggccgaggacgctgccacatactattgtcagcagtggagctcatatcctttgacattcggttgcggtactaaactcgaaatcaagcgtacggtggcagctcccagcgtttttatctttcccccatccgacgagcagctcaagagtggcactgcctctgtagtttgtttgctgaataacttctatccacgtgaagcaaaagtacagtggaaggtcgataatgcccttcagagcggtaacagccaagaaagtgttaccgagcaagattccaaagattccacttacagtctgtccagcacattgacactgagtaaggctgattacgaaaaacacaaggtgtacgcatgcgaggtgacacaccaaggtctttcatctcctgtaactaagagctttaaccggggagaatgtggtggtgggggcagcgggggcggaggtagtggaggcggcggtagtgaaccaaagagtagtgacaaaactcacacgtgcccaccgtgcccagcacctgaactcctggggggaccgtcagtcttcctcttccccccaaaacccaaggacaccctcatgatctcccggacccctgaggtcacatgcgtggtggtggacgtgagccacgaagaccctgaggtcaagttcaactggtacgtggacggcgtggaggtgcataatgccaagacaaagccgcgggaggagcagtacaacagcacgtaccgtgtggtcagcgtcctcaccgtcctgcaccaggactggctgaatggcaaggagtacaagtgcaaggtctccaacaaagccctcccagcccccatcgagaaaaccatctccaaagccaaagggcagccccgagaaccacaggtgtacaccctgcccccatgccgggaggagatgaccaagaaccaggtcagcctgtggtgcctggtcaaaggcttctatcccagcgacatcgccgtggagtgggagagcaatgggcagccggagaacaactacaagaccacgcctcccgtgctggactccgacggctccttcttcctctacagcaagctcaccgtggacaagagcaggtggcagcaggggaacgtcttctcatgctccgtgatgcatgaggctctgcacaaccactacacgcagaagagcctctccctgtctccgggtaaa

SEQ ID NO: 510 - DNA, 1716 bp, synthetic construct
  misc_feature 1..1716: note = nucleotide sequence coding GPB01 HC
  source 1..1716: mol_type = other DNA
caggttcagcttgtgcaatcaggcgctgaagtcaaaaaaccaggagcaagcgtgaaagtaagctgtaaggcttccggttacactttcaccgattacgaaatgcactgggtacgccaggctcctggacaaggcctggaatggatgggcgcacttgatccaaaaacaggtgacactgcttacagtcaaaaattcaaaggtcgtgtcactcttacagcagataagtccaccagtaccgcttatatggagcttagctccctgacttccgaggacaccgccgtgtattattgtacaagattctactcatatacttactggggccaaggaaccctggtgacagtgtcatctgctagcaccaaaggacctagtgtttttcctcttgcccctgaagttcagcttgtcgaaagtggcggaggtcttgtaaagccaggagggtccctgaagttgagttgtgctgcctctggcttcaccttttcacggtatgccatgtcctgggttcgacagatacctgagaagtgtcttgaatgggtggccgcaatagacagtagcggtggtgacacctattacctcgacacagtcaaagaccgctttactatctcacgcgataacgccaacaataccctgcacttgcagatgcgatcacttcgttcagaagacactgctctttactattgtgtacgccaagggggagcatactggggtcagggaacactggttaccgtgtcttcagctagcaccaaaggacctagtgtttttcctcttgccccttcctcaaagtctacctctggggggacagccgctctgggctgcctggtcaaggattatttcccagagcctgtcactgtcagttggaactctggagccttgacttctggtgttcatacatttcctgctgtccttcaaagcagcggcttgtactcattgtcttctgttgtgacagtaccctcaagcagcctcggcactcagacatacatctgcaatgtcaaccacaaaccctcaaatacaaaggtagataaaaaagtcgaaccaaagtcttgtgacaaaactcacacgtgcccaccgtgcccagcacctgaactcctggggggaccgtcagtcttcctcttccccccaaaacccaaggacaccctcatgatctcccggacccctgaggtcacatgcgtggtggtggacgtgagccacgaagaccctgaggtcaagttcaactggtacgtggacggcgtggaggtgcataatgccaagacaaagccgcgggaggagcagtacaacagcacgtaccgtgtggtcagcgtcctcaccgtcctgcaccaggactggctgaatggcaaggagtacaagtgcaaggtctccaacaaagccctcccagcccccatcgagaaaaccatctccaaagccaaagggcagccccgagaaccacaggtgtacaccctgcccccatgccgggaggagatgaccaagaaccaggtcagcctgtggtgcctggtcaaaggcttctatcccagcgacatcgccgtggagtgggagagcaatgggcagccggagaacaactacaagaccacgcctcccgtgctggactccgacggctccttcttcctctacagcaagctcaccgtggacaagagcaggtggcagcaggggaacgtcttctcatgctccgtgatgcatgaggctctgcacaaccactacacgcagaagagcctctccctgtctccgggtaaa

SEQ ID NO: 511 - DNA, 1773 bp, synthetic construct
  misc_feature 1..1773: note = nucleotide sequence coding GPB01 LC
  source 1..1773: mol_type = other DNA
gatgttgttatgactcagtcacctctctcacttcctgtaacccctggtgaaccagcctctataagctgccggtcaagtcaaagcctggttcatagcaaccgtaacacttaccttcactggtacttgcaaaaacctggtcagtccccacaactcttgatctacaaagtctccaatcgcttctctggagtccctgacaggttttctggtagtggatcaggtacagacttcactttgaaaatcagccgcgttgaggccgaggacgtgggagtgtattattgctctcagaatacccatgtacccccaacctttggccaagggactaaactcgagattaaacgtacggtggccgctccctccgtgttcatcttcccacccgacgtggttatgactcagactcctctgactctctccgtcactattggtcagcccgcttccatatcatgtaaatcatcacaatctcttcttgatagcgatggcaagacttatttgaactggttgttgcaacgcccaggtcagagccctaagagacttatctatttggtgagcaaactcgacagcggtgcacccgatcgttttaccggaagcggcagcggcaccgatttcacactgaagatcagtagggtcgaagctgaagacctgggaatctactactgctggcaaggtactcactttcccctgactttcggctgcggtactaaacttgagatcaaacgtacggtggcagctcccagcgtttttatctttcccccatccgacgagcagctcaagagtggcactgcctctgtagtttgtttgctgaataacttctatccacgtgaagcaaaagtacagtggaaggtcgataatgcccttcagagcggtaacagccaagaaagtgttaccgagcaagattccaaagattccacttacagtctgtccagcacattgacactgagtaaggctgattacgaaaaacacaaggtgtacgcatgcgaggtgacacaccaaggtctttcatctcctgtaactaagagctttaaccggggagaatgtggtggtgggggcagcgggggcggaggtagtggaggcggcggtagtgaaccaaagagtagtgacaaaactcacacgtgcccaccgtgcccagcacctgaactcctggggggaccgtcagtcttcctcttccccccaaaacccaaggacaccctcatgatctcccggacccctgaggtcacatgcgtggtggtggacgtgagccacgaagaccctgaggtcaagttcaactggtacgtggacggcgtggaggtgcataatgccaagacaaagccgcgggaggagcagtacaacagcacgtaccgtgtggtcagcgtcctcaccgtcctgcaccaggactggctgaatggcaaggagtacaagtgcaaggtctccaacaaagccctcccagcccccatcgagaaaaccatctccaaagccaaagggcagccccgagaaccacaggtgtacaccctgcccccatgccgggaggagatgaccaagaaccaggtcagcctgtggtgcctggtcaaaggcttctatcccagcgacatcgccgtggagtgggagagcaatgggcagccggagaacaactacaagaccacgcctcccgtgctggactccgacggctccttcttcctctacagcaagctcaccgtggacaagagcaggtggcagcaggggaacgtcttctcatgctccgtgatgcatgaggctctgcacaaccactacacgcagaagagcctctccctgtctccgggtaaa

SEQ ID NO: 512 - DNA, 1743 bp, synthetic construct
  misc_feature 1..1743: note = nucleotide sequence coding GPB03 HC
  source 1..1743: mol_type = other DNA
caggttcagcttgtgcaatcaggcgctgaagtcaaaaaaccaggagcaagcgtgaaagtaagctgtaaggcttccggttacactttcaccgattacgaaatgcactgggtacgccaggctcctggacaaggcctggaatggatgggcgcacttgatccaaaaacaggtgacactgcttacagtcaaaaattcaaaggtcgtgtcactcttacagcagataagtccaccagtaccgcttatatggagcttagctccctgacttccgaggacaccgccgtgtattattgtacaagattctactcatatacttactggggccaaggaaccctggtgacagtgtcatctgctagcaccaaaggacctagtgtttttcctcttgcccctgaagtgcaactggtcgaaacaggcgggggactggtacagcccaagggatctttgaaacttagttgtgctgctagtgggtttacattcaatgcctccgcaatgaactgggtaagacaagctcctggcaagtgcctggaatgggtggcccgtattcgctctaaaagtaataactacgctatttattacgctgattctgtaaaggatcggtttacaataagtcgggacgacagccaatccatgctgtatctccaaatgaataacctgaaaacagaggatactgccatgtactattgtgtgcgggacccaggctattacgggaatccctggttcgcctattggggacagggcactctggttaccgtatcatcagctagcaccaaaggacctagtgtttttcctcttgccccttcctcaaagtctacctctggggggacagccgctctgggctgcctggtcaaggattatttcccagagcctgtcactgtcagttggaactctggagccttgacttctggtgttcatacatttcctgctgtccttcaaagcagcggcttgtactcattgtcttctgttgtgacagtaccctcaagcagcctcggcactcagacatacatctgcaatgtcaaccacaaaccctcaaatacaaaggtagataaaaaagtcgaaccaaagtcttgtgacaaaactcacacgtgcccaccgtgcccagcacctgaactcctggggggaccgtcagtcttcctcttccccccaaaacccaaggacaccctcatgatctcccggacccctgaggtcacatgcgtggtggtggacgtgagccacgaagaccctgaggtcaagttcaactggtacgtggacggcgtggaggtgcataatgccaagacaaagccgcgggaggagcagtacaacagcacgtaccgtgtggtcagcgtcctcaccgtcctgcaccaggactggctgaatggcaaggagtacaagtgcaaggtctccaacaaagccctcccagcccccatcgagaaaaccatctccaaagccaaagggcagccccgagaaccacaggtgtacaccctgcccccatgccgggaggagatgaccaagaaccaggtcagcctgtggtgcctggtcaaaggcttctatcccagcgacatcgccgtggagtgggagagcaatgggcagccggagaacaactacaagaccacgcctcccgtgctggactccgacggctccttcttcctctacagcaagctcaccgtggacaagagcaggtggcagcaggggaacgtcttctcatgctccgtgatgcatgaggctctgcacaaccactacacgcagaagagcctctccctgtctccgggtaaa

SEQ ID NO: 513 - DNA, 1755 bp, synthetic construct
  misc_feature 1..1755: note = nucleotide sequence coding GPB03 LC
  source 1..1755: mol_type = other DNA
gatgttgttatgactcagtcacctctctcacttcctgtaacccctggtgaaccagcctctataagctgccggtcaagtcaaagcctggttcatagcaaccgtaacacttaccttcactggtacttgcaaaaacctggtcagtccccacaactcttgatctacaaagtctccaatcgcttctctggagtccctgacaggttttctggtagtggatcaggtacagacttcactttgaaaatcagccgcgttgaggccgaggacgtgggagtgtattattgctctcagaatacccatgtacccccaacctttggccaagggactaaactcgagattaaacgtacggtggccgctccctccgtgttcatcttcccaccccaaattgtcctcacccaatcaccagctataatgtctgcttttcccggcgagaaagtaaccatgacttgtagcgcctctagtagcgtgtcatatatgtattggtatcaacaaaagagcggtagttcacctcgactccttatctacgacacaagtaatctcgctagtggtgtcccagtccgtttctccgggagcggcagcggcacatcatactccctgaccatctccagaatggaggccgaggacgctgccacatactattgtcagcagtggagctcatatcctttgacattcggttgcggtactaaactcgaaatcaagcgtacggtggcagctcccagcgtttttatctttcccccatccgacgagcagctcaagagtggcactgcctctgtagtttgtttgctgaataacttctatccacgtgaagcaaaagtacagtggaaggtcgataatgcccttcagagcggtaacagccaagaaagtgttaccgagcaagattccaaagattccacttacagtctgtccagcacattgacactgagtaaggctgattacgaaaaacacaaggtgtacgcatgcgaggtgacacaccaaggtctttcatctcctgtaactaagagctttaaccggggagaatgtggtggtgggggcagcgggggcggaggtagtggaggcggcggtagtgaaccaaagagtagtgacaaaactcacacgtgcccaccgtgcccagcacctgaactcctggggggaccgtcagtcttcctcttccccccaaaacccaaggacaccctcatgatctcccggacccctgaggtcacatgcgtggtggtggacgtgagccacgaagaccctgaggtcaagttcaactggtacgtggacggcgtggaggtgcataatgccaagacaaagccgcgggaggagcagtacaacagcacgtaccgtgtggtcagcgtcctcaccgtcctgcaccaggactggctgaatggcaaggagtacaagtgcaaggtctccaacaaagccctcccagcccccatcgagaaaaccatctccaaagccaaagggcagccccgagaaccacaggtgtacaccctgcccccatgccgggaggagatgaccaagaaccaggtcagcctgtggtgcctggtcaaaggcttctatcccagcgacatcgccgtggagtgggagagcaatgggcagccggagaacaactacaagaccacgcctcccgtgctggactccgacggctccttcttcctctacagcaagctcaccgtggacaagagcaggtggcagcaggggaacgtcttctcatgctccgtgatgcatgaggctctgcacaaccactacacgcagaagagcctctccctgtctccgggtaaa

SEQ ID NO: 514 - DNA, 1716 bp, synthetic construct
  misc_feature 1..1716: note = nucleotide sequence coding GPB04 HC
  source 1..1716: mol_type = other DNA
gaagttcagcttgtcgaaagtggcggaggtcttgtaaagccaggagggtccctgaagttgagttgtgctgcctctggcttcaccttttcacggtatgccatgtcctgggttcgacagatacctgagaagattcttgaatgggtggccgcaatagacagtagcggtggtgacacctattacctcgacacagtcaaagaccgctttactatctcacgcgataacgccaacaataccctgcacttgcagatgcgatcacttcgttcagaagacactgctctttactattgtgtacgccaagggggagcatactggggtcagggaacactggttaccgtgtcttcagctagcaccaaaggacctagtgtttttcctcttgcccctcaggttcagcttgtgcaatcaggcgctgaagtcaaaaaaccaggagcaagcgtgaaagtaagctgtaaggcttccggttacactttcaccgattacgaaatgcactgggtacgccaggctcctggacaatgtctggaatggatgggcgcacttgatccaaaaacaggtgacactgcttacagtcaaaaattcaaaggtcgtgtcactcttacagcagataagtccaccagtaccgcttatatggagcttagctccctgacttccgaggacaccgccgtgtattattgtacaagattctactcatatacttactggggccaaggaaccctggtgacagtgtcatctgctagcaccaaaggacctagtgtttttcctcttgccccttcctcaaagtctacctctggggggacagccgctctgggctgcctggtcaaggattatttcccagagcctgtcactgtcagttggaactctggagccttgacttctggtgttcatacatttcctgctgtccttcaaagcagcggcttgtactcattgtcttctgttgtgacagtaccctcaagcagcctcggcactcagacatacatctgcaatgtcaaccacaaaccctcaaatacaaaggtagataaaaaagtcgaaccaaagtcttgtgacaaaactcacacgtgcccaccgtgcccagcacctgaactcctggggggaccgtcagtcttcctcttccccccaaaacccaaggacaccctcatgatctcccggacccctgaggtcacatgcgtggtggtggacgtgagccacgaagaccctgaggtcaagttcaactggtacgtggacggcgtggaggtgcataatgccaagacaaagccgcgggaggagcagtacaacagcacgtaccgtgtggtcagcgtcctcaccgtcctgcaccaggactggctgaatggcaaggagtacaagtgcaaggtctccaacaaagccctcccagcccccatcgagaaaaccatctccaaagccaaagggcagccccgagaaccacaggtgtacaccctgcccccatgccgggaggagatgaccaagaaccaggtcagcctgtggtgcctggtcaaaggcttctatcccagcgacatcgccgtggagtgggagagcaatgggcagccggagaacaactacaagaccacgcctcccgtgctggactccgacggctccttcttcctctacagcaagctcaccgtggacaagagcaggtggcagcaggggaacgtcttctcatgctccgtgatgcatgaggctctgcacaaccactacacgcagaagagcctctccctgtctccgggtaaa

SEQ ID NO: 515 - DNA, 1773 bp, synthetic construct
  misc_feature 1..1773: note = nucleotide sequence coding GPB04 LC
  source 1..1773: mol_type = other DNA
gacgtggttatgactcagactcctctgactctctccgtcactattggtcagcccgcttccatatcatgtaaatcatcacaatctcttcttgatagcgatggcaagacttatttgaactggttgttgcaacgcccaggtcagagccctaagagacttatctatttggtgagcaaactcgacagcggtgcacccgatcgttttaccggaagcggcagcggcaccgatttcacactgaagatcagtagggtcgaagctgaagacctgggaatctactactgctggcaaggtactcactttcccctgactttcggcgccggtactaaacttgagatcaaacgtacggtggcagctcccagcgtttttatctttcccccagatgttgttatgactcagtcacctctctcacttcctgtaacccctggtgaaccagcctctataagctgccggtcaagtcaaagcctggttcatagcaaccgtaacacttaccttcactggtacttgcaaaaacctggtcagtccccacaactcttgatctacaaagtctccaatcgcttctctggagtccctgacaggttttctggtagtggatcaggtacagacttcactttgaaaatcagccgcgttgaggccgaggacgtgggagtgtattattgctctcagaatacccatgtacccccaacctttggctgtgggactaaactcgagattaaacgtacggtggcagctcccagcgtttttatctttcccccatccgacgagcagctcaagagtggcactgcctctgtagtttgtttgctgaataacttctatccacgtgaagcaaaagtacagtggaaggtcgataatgcccttcagagcggtaacagccaagaaagtgttaccgagcaagattccaaagattccacttacagtctgtccagcacattgacactgagtaaggctgattacgaaaaacacaaggtgtacgcatgcgaggtgacacaccaaggtctttcatctcctgtaactaagagctttaaccggggagaatgtggtggtgggggcagcgggggcggaggtagtggaggcggcggtagtgaaccaaagagtagtgacaaaactcacacgtgcccaccgtgcccagcacctgaactcctggggggaccgtcagtcttcctcttccccccaaaacccaaggacaccctcatgatctcccggacccctgaggtcacatgcgtggtggtggacgtgagccacgaagaccctgaggtcaagttcaactggtacgtggacggcgtggaggtgcataatgccaagacaaagccgcgggaggagcagtacaacagcacgtaccgtgtggtcagcgtcctcaccgtcctgcaccaggactggctgaatggcaaggagtacaagtgcaaggtctccaacaaagccctcccagcccccatcgagaaaaccatctccaaagccaaagggcagccccgagaaccacaggtgtacaccctgcccccatgccgggaggagatgaccaagaaccaggtcagcctgtggtgcctggtcaaaggcttctatcccagcgacatcgccgtggagtgggagagcaatgggcagccggagaacaactacaagaccacgcctcccgtgctggactccgacggctccttcttcctctacagcaagctcaccgtggacaagagcaggtggcagcaggggaacgtcttctcatgctccgtgatgcatgaggctctgcacaaccactacacgcagaagagcctctccctgtctccgggtaaa

SEQ ID NO: 516 - DNA, 1743 bp, synthetic construct
  misc_feature 1..1743: note = nucleotide sequence coding GPB06 HC
  source 1..1743: mol_type = other DNA
gaagtgcaactggtcgaaacaggcgggggactggtacagcccaagggatctttgaaacttagttgtgctgctagtgggtttacattcaatgcctccgcaatgaactgggtaagacaagctcctggcaagggcctggaatgggtggcccgtattcgctctaaaagtaataactacgctatttattacgctgattctgtaaaggatcggtttacaataagtcgggacgacagccaatccatgctgtatctccaaatgaataacctgaaaacagaggatactgccatgtactattgtgtgcgggacccaggctattacgggaatccctggttcgcctattggggacagggcactctggttaccgtatcatcagctagcaccaaaggacctagtgtttttcctcttgcccctcaggttcagcttgtgcaatcaggcgctgaagtcaaaaaaccaggagcaagcgtgaaagtaagctgtaaggcttccggttacactttcaccgattacgaaatgcactgggtacgccaggctcctggacaatgtctggaatggatgggcgcacttgatccaaaaacaggtgacactgcttacagtcaaaaattcaaaggtcgtgtcactcttacagcagataagtccaccagtaccgcttatatggagcttagctccctgacttccgaggacaccgccgtgtattattgtacaagattctactcatatacttactggggccaaggaaccctggtgacagtgtcatctgctagcaccaaaggacctagtgtttttcctcttgccccttcctcaaagtctacctctggggggacagccgctctgggctgcctggtcaaggattatttcccagagcctgtcactgtcagttggaactctggagccttgacttctggtgttcatacatttcctgctgtccttcaaagcagcggcttgtactcattgtcttctgttgtgacagtaccctcaagcagcctcggcactcagacatacatctgcaatgtcaaccacaaaccctcaaatacaaaggtagataaaaaagtcgaaccaaagtcttgtgacaaaactcacacgtgcccaccgtgcccagcacctgaactcctggggggaccgtcagtcttcctcttccccccaaaacccaaggacaccctcatgatctcccggacccctgaggtcacatgcgtggtggtggacgtgagccacgaagaccctgaggtcaagttcaactggtacgtggacggcgtggaggtgcataatgccaagacaaagccgcgggaggagcagtacaacagcacgtaccgtgtggtcagcgtcctcaccgtcctgcaccaggactggctgaatggcaaggagtacaagtgcaaggtctccaacaaagccctcccagcccccatcgagaaaaccatctccaaagccaaagggcagccccgagaaccacaggtgtacaccctgcccccatgccgggaggagatgaccaagaaccaggtcagcctgtggtgcctggtcaaaggcttctatcccagcgacatcgccgtggagtgggagagcaatgggcagccggagaacaactacaagaccacgcctcccgtgctggactccgacggctccttcttcctctacagcaagctcaccgtggacaagagcaggtggcagcaggggaacgtcttctcatgctccgtgatgcatgaggctctgcacaaccactacacgcagaagagcctctccctgtctccgggtaaa

SEQ ID NO: 517 - DNA, 1755 bp, synthetic construct
  misc_feature 1..1755: note = nucleotide sequence coding GPB06 LC
  source 1..1755: mol_type = other DNA
caaattgtcctcacccaatcaccagctataatgtctgcttttcccggcgagaaagtaaccatgacttgtagcgcctctagtagcgtgtcatatatgtattggtatcaacaaaagagcggtagttcacctcgactccttatctacgacacaagtaatctcgctagtggtgtcccagtccgtttctccgggagcggcagcggcacatcatactccctgaccatctccagaatggaggccgaggacgctgccacatactattgtcagcagtggagctcatatcctttgacattcggtggaggtactaaactcgaaatcaagcgtacggtggcagctcccagcgtttttatctttcccccagatgttgttatgactcagtcacctctctcacttcctgtaacccctggtgaaccagcctctataagctgccggtcaagtcaaagcctggttcatagcaaccgtaacacttaccttcactggtacttgcaaaaacctggtcagtccccacaactcttgatctacaaagtctccaatcgcttctctggagtccctgacaggttttctggtagtggatcaggtacagacttcactttgaaaatcagccgcgttgaggccgaggacgtgggagtgtattattgctctcagaatacccatgtacccccaacctttggctgtgggactaaactcgagattaaacgtacggtggcagctcccagcgtttttatctttcccccatccgacgagcagctcaagagtggcactgcctctgtagtttgtttgctgaataacttctatccacgtgaagcaaaagtacagtggaaggtcgataatgcccttcagagcggtaacagccaagaaagtgttaccgagcaagattccaaagattccacttacagtctgtccagcacattgacactgagtaaggctgattacgaaaaacacaaggtgtacgcatgcgaggtgacacaccaaggtctttcatctcctgtaactaagagctttaaccggggagaatgtggtggtgggggcagcgggggcggaggtagtggaggcggcggtagtgaaccaaagagtagtgacaaaactcacacgtgcccaccgtgcccagcacctgaactcctggggggaccgtcagtcttcctcttccccccaaaacccaaggacaccctcatgatctcccggacccctgaggtcacatgcgtggtggtggacgtgagccacgaagaccctgaggtcaagttcaactggtacgtggacggcgtggaggtgcataatgccaagacaaagccgcgggaggagcagtacaacagcacgtaccgtgtggtcagcgtcctcaccgtcctgcaccaggactggctgaatggcaaggagtacaagtgcaaggtctccaacaaagccctcccagcccccatcgagaaaaccatctccaaagccaaagggcagccccgagaaccacaggtgtacaccctgcccccatgccgggaggagatgaccaagaaccaggtcagcctgtggtgcctggtcaaaggcttctatcccagcgacatcgccgtggagtgggagagcaatgggcagccggagaacaactacaagaccacgcctcccgtgctggactccgacggctccttcttcctctacagcaagctcaccgtggacaagagcaggtggcagcaggggaacgtcttctcatgctccgtgatgcatgaggctctgcacaaccactacacgcagaagagcctctccctgtctccgggtaaa

SEQ ID NO: 518 - DNA, 342 bp, synthetic construct
  misc_feature 1..342: note = nucleotide sequence coding VH of GPM01
  source 1..342: mol_type = other DNA
gaagttcagcttgtcgaaagtggcggaggtcttgtaaagccaggagggtccctgaagttgagttgtgctgcctctggcttcaccttttcacggtatgccatgtcctgggttcgacagatacctgagaagtgtcttgaatgggtggccgcaatagacagtagcggtggtgacacctattacctcgacacagtcaaagaccgctttactatctcacgcgataacgccaacaataccctgcacttgcagatgcgatcacttcgttcagaagacactgctctttactattgtgtacgccaagggggagcatactggggtcagggaacactggttaccgtgtcttca

SEQ ID NO: 519 - DNA, 336 bp, synthetic construct
  misc_feature 1..336: note = nucleotide sequence coding VL of GPM01
  source 1..336: mol_type = other DNA
gacgtggttatgactcagactcctctgactctctccgtcactattggtcagcccgcttccatatcatgtaaatcatcacaatctcttcttgatagcgatggcaagacttatttgaactggttgttgcaacgcccaggtcagagccctaagagacttatctatttggtgagcaaactcgacagcggtgcacccgatcgttttaccggaagcggcagcggcaccgatttcacactgaagatcagtagggtcgaagctgaagacctgggaatctactactgctggcaaggtactcactttcccctgactttcggctgcggtactaaacttgagatcaaa

SEQ ID NO: 520 - DNA, 345 bp, synthetic construct
  misc_feature 1..345: note = nucleotide sequence coding VH of GPM02
  source 1..345: mol_type = other DNA
caggttcagcttgtgcaatcaggcgctgaagtcaaaaaaccaggagcaagcgtgaaagtaagctgtaaggcttccggttacactttcaccgattacgaaatgcactgggtacgccaggctcctggacaatgtctggaatggatgggcgcacttgatccaaaaacaggtgacactgcttacagtcaaaaattcaaaggtcgtgtcactcttacagcagataagtccaccagtaccgcttatatggagcttagctccctgacttccgaggacaccgccgtgtattattgtacaagattctactcatatacttactggggccaaggaaccctggtgacagtgtcatct

SEQ ID NO: 521 - DNA, 336 bp, synthetic construct
  misc_feature 1..336: note = nucleotide sequence coding VL of GPM02
  source 1..336: mol_type = other DNA
gatgttgttatgactcagtcacctctctcacttcctgtaacccctggtgaaccagcctctataagctgccggtcaagtcaaagcctggttcatagcaaccgtaacacttaccttcactggtacttgcaaaaacctggtcagtccccacaactcttgatctacaaagtctccaatcgcttctctggagtccctgacaggttttctggtagtggatcaggtacagacttcactttgaaaatcagccgcgttgaggccgaggacgtgggagtgtattattgctctcagaatacccatgtacccccaacctttggctgtgggactaaactcgagattaaa

SEQ ID NO: 522 - DNA, 369 bp, synthetic construct
  misc_feature 1..369: note = nucleotide sequence coding VH of GPM04
  source 1..369: mol_type = other DNA
gaagtgcaactggtcgaaacaggcgggggactggtacagcccaagggatctttgaaacttagttgtgctgctagtgggtttacattcaatgcctccgcaatgaactgggtaagacaagctcctggcaagtgcctggaatgggtggcccgtattcgctctaaaagtaataactacgctatttattacgctgattctgtaaaggatcggtttacaataagtcgggacgacagccaatccatgctgtatctccaaatgaataacctgaaaacagaggatactgccatgtactattgtgtgcgggacccaggctattacgggaatccctggttcgcctattggggacagggcactctggttaccgtatcatca

SEQ ID NO: 523 - DNA, 318 bp, synthetic construct
  misc_feature 1..318: note = nucleotide sequence coding VL of GPM04
  source 1..318: mol_type = other DNA
caaattgtcctcacccaatcaccagctataatgtctgcttttcccggcgagaaagtaaccatgacttgtagcgcctctagtagcgtgtcatatatgtattggtatcaacaaaagagcggtagttcacctcgactccttatctacgacacaagtaatctcgctagtggtgtcccagtccgtttctccgggagcggcagcggcacatcatactccctgaccatctccagaatggaggccgaggacgctgccacatactattgtcagcagtggagctcatatcctttgacattcggttgcggtactaaactcgaaatcaag

SEQ ID NO: 524 - DNA, 342 bp, synthetic construct
  misc_feature 1..342: note = nucleotide sequence coding VH1 of GPB04
  source 1..342: mol_type = other DNA
gaagttcagcttgtcgaaagtggcggaggtcttgtaaagccaggagggtccctgaagttgagttgtgctgcctctggcttcaccttttcacggtatgccatgtcctgggttcgacagatacctgagaagattcttgaatgggtggccgcaatagacagtagcggtggtgacacctattacctcgacacagtcaaagaccgctttactatctcacgcgataacgccaacaataccctgcacttgcagatgcgatcacttcgttcagaagacactgctctttactattgtgtacgccaagggggagcatactggggtcagggaacactggttaccgtgtcttca

SEQ ID NO: 525 - DNA, 336 bp, synthetic construct
  misc_feature 1..336: note = nucleotide sequence coding VL1 of GPB04
  source 1..336: mol_type = other DNA
gacgtggttatgactcagactcctctgactctctccgtcactattggtcagcccgcttccatatcatgtaaatcatcacaatctcttcttgatagcgatggcaagacttatttgaactggttgttgcaacgcccaggtcagagccctaagagacttatctatttggtgagcaaactcgacagcggtgcacccgatcgttttaccggaagcggcagcggcaccgatttcacactgaagatcagtagggtcgaagctgaagacctgggaatctactactgctggcaaggtactcactttcccctgactttcggcgccggtactaaacttgagatcaaa

SEQ ID NO: 526 - DNA, 369 bp, synthetic construct
  misc_feature 1..369: note = nucleotide sequence coding VH1 of GPB06
  source 1..369: mol_type = other DNA
gaagtgcaactggtcgaaacaggcgggggactggtacagcccaagggatctttgaaacttagttgtgctgctagtgggtttacattcaatgcctccgcaatgaactgggtaagacaagctcctggcaagggcctggaatgggtggcccgtattcgctctaaaagtaataactacgctatttattacgctgattctgtaaaggatcggtttacaataagtcgggacgacagccaatccatgctgtatctccaaatgaataacctgaaaacagaggatactgccatgtactattgtgtgcgggacccaggctattacgggaatccctggttcgcctattggggacagggcactctggttaccgtatcatca

SEQ ID NO: 527 - DNA, 318 bp, synthetic construct
  misc_feature 1..318: note = nucleotide sequence coding VL1 of GPB06
  source 1..318: mol_type = other DNA
caaattgtcctcacccaatcaccagctataatgtctgcttttcccggcgagaaagtaaccatgacttgtagcgcctctagtagcgtgtcatatatgtattggtatcaacaaaagagcggtagttcacctcgactccttatctacgacacaagtaatctcgctagtggtgtcccagtccgtttctccgggagcggcagcggcacatcatactccctgaccatctccagaatggaggccgaggacgctgccacatactattgtcagcagtggagctcatatcctttgacattcggtggaggtactaaactcgaaatcaag

SEQ ID NO: 528 - DNA, 1800 bp, synthetic construct
  misc_feature 1..1800: note = nucleotide sequence coding EPB01 HC
  source 1..1800: mol_type = other DNA
gaggtgcaactgcttgagtcaggaggaggactggttcaacccggcgggagccttcgactctcatgtgcagcctctgggtttacatttagtcgttaccaaatgatgtgggtacgccaggcccccggaaaaggtttggagtgggtgagcagcatttctccttcaggaggagtgacactttacgcagacagtgttaagggtcggttcacaatcagtcgtgataattccaagaacactctctatctccaaatgaactcccttcgagctgaggacactgctgtttattactgtactcgggaacttctcggcactgtggttgttcctgtggcttggaagatgcgtggatacttcgactattgggggcaactcactcttgttaccgtctcaagcgctagcaccaaaggacctagtgtttttcctcttgcccctgaggttcaactccttgaatccggaggaggacttgtccaaccaggcggcagccttaggctgtcctgcgctgcctcaggctttacattcagtcattacatgatggcctgggttagacaggcacccggcaaatgtctggaatgggtcagccgaataggaccatcaggaggtcccactcactatgccgattctgtaaaagggaggtttacaatttccagagacaattcaaagaataccctttacctccagatgaactcattgagagccgaggacacagccgtatattattgcgcaggttatgattccggttacgattacgttgcagtcgcaggcccagccgaatacttccaacattggggtcagggaaccctcgtgaccgtgtccagtgctagcaccaaaggacctagtgtttttcctcttgccccttcctcaaagtctacctctggggggacagccgctctgggctgcctggtcaaggattatttcccagagcctgtcactgtcagttggaactctggagccttgacttctggtgttcatacatttcctgctgtccttcaaagcagcggcttgtactcattgtcttctgttgtgacagtaccctcaagcagcctcggcactcagacatacatctgcaatgtcaaccacaaaccctcaaatacaaaggtagataaaaaagtcgaaccaaagtcttgtgacaaaactcacacgtgcccaccgtgcccagcacctgaactcctggggggaccgtcagtcttcctcttccccccaaaacccaaggacaccctcatgatctcccggacccctgaggtcacatgcgtggtggtggacgtgagccacgaagaccctgaggtcaagttcaactggtacgtggacggcgtggaggtgcataatgccaagacaaagccgcgggaggagcagtacaacagcacgtaccgtgtggtcagcgtcctcaccgtcctgcaccaggactggctgaatggcaaggagtacaagtgcaaggtctccaacaaagccctcccagcccccatcgagaaaaccatctccaaagccaaagggcagccccgagaaccacaggtgtacaccctgcccccatgccgggaggagatgaccaagaaccaggtcagcctgtggtgcctggtcaaaggcttctatcccagcgacatcgccgtggagtgggagagcaatgggcagccggagaacaactacaagaccacgcctcccgtgctggactccgacggctccttcttcctctacagcaagctcaccgtggacaagagcaggtggcagcaggggaacgtcttctcatgctccgtgatgcatgaggctctgcacaaccactacacgcagaagagcctctccctgtctccgggtaaa

SEQ ID NO: 529 - DNA, 1746 bp, synthetic construct
  misc_feature 1..1746: note = nucleotide sequence coding EPB01 LC
  source 1..1746: mol_type = other DNA
gacatacagatgactcagagccctggtacactgagtgtatctcctggggaacgcgccactctgtcttgccgagcctctcaaagcgttagttccaacctggcttggtatcagcaaaaacccggtcaagcacctcgcttgcttatctacggggcctccacacgggcaaccggcattcctgcacgctttagtggctctggtagcgggactgaattcactttgactatatcttccatgcagagtgaggatttcgccgtttattattgtcaacagtacaataactggcctccactcacttttggtggtggcaccaaagtggagataaagcgtacggtggcagctcccagcgtttttatctttcccccagacatacagatgacacaaagtccaagtagcctttctgcatccgttggagaccgcgtaaccataacttgtcgagcatcacaaagcataagcacttggcttgcttggtatcagcagaagccaggcaaagcacccaagctgctgatttataaagcctctaatctccatacaggagttcccagccgtttctcaggcagcgggtctggaaccgaattctctctgaccatctctggcttgcaacctgatgactttgcaacatattactgtcaacaatataattcatatagtcgtactttcgggtgtggcactaaggtggaaatcaaacgtacggtggcagctcccagcgtttttatctttcccccatccgacgagcagctcaagagtggcactgcctctgtagtttgtttgctgaataacttctatccacgtgaagcaaaagtacagtggaaggtcgataatgcccttcagagcggtaacagccaagaaagtgttaccgagcaagattccaaagattccacttacagtctgtccagcacattgacactgagtaaggctgattacgaaaaacacaaggtgtacgcatgcgaggtgacacaccaaggtctttcatctcctgtaactaagagctttaaccggggagaatgtggtggtgggggcagcgggggcggaggtagtggaggcggcggtagtgaaccaaagagtagtgacaaaactcacacgtgcccaccgtgcccagcacctgaactcctggggggaccgtcagtcttcctcttccccccaaaacccaaggacaccctcatgatctcccggacccctgaggtcacatgcgtggtggtggacgtgagccacgaagaccctgaggtcaagttcaactggtacgtggacggcgtggaggtgcataatgccaagacaaagccgcgggaggagcagtacaacagcacgtaccgtgtggtcagcgtcctcaccgtcctgcaccaggactggctgaatggcaaggagtacaagtgcaaggtctccaacaaagccctcccagcccccatcgagaaaaccatctccaaagccaaagggcagccccgagaaccacaggtgtacaccctgcccccatgccgggaggagatgaccaagaaccaggtcagcctgtggtgcctggtcaaaggcttctatcccagcgacatcgccgtggagtgggagagcaatgggcagccggagaacaactacaagaccacgcctcccgtgctggactccgacggctccttcttcctctacagcaagctcaccgtggacaagagcaggtggcagcaggggaacgtcttctcatgctccgtgatgcatgaggctctgcacaaccactacacgcagaagagcctctccctgtctccgggtaaa

SEQ ID NO: 530 - DNA, 1773 bp, synthetic construct
  misc_feature 1..1773: note = nucleotide sequence coding EPB02 HC
  source 1..1773: mol_type = other DNA
gaggtccagctggttgagtctggaggtggtgtagtcaggccaggaggttccctgcgtctgtcttgcgctgcctctgggttcactgtgtctgactacagtatgaactgggttagacaggctccagggaaaggtttggaatggatagggtttattcgcaataaagccaatgcctataccaccgaatacagcgcaagcgttaaaggcaggttcaccatcagtagggacgactctaagaataccctctacctgcagatgaatagcttgaagacagaggataccgctgtttattactgcactacctaccccaggtatcatgctatggacagttggggtcaaggaactatggtcaccgtctcctctgctagcaccaaaggacctagtgtttttcctcttgcccctgaggttcaactccttgaatccggaggaggacttgtccaaccaggcggcagccttaggctgtcctgcgctgcctcaggctttacattcagtcattacatgatggcctgggttagacaggcacccggcaaatgtctggaatgggtcagccgaataggaccatcaggaggtcccactcactatgccgattctgtaaaagggaggtttacaatttccagagacaattcaaagaataccctttacctccagatgaactcattgagagccgaggacacagccgtatattattgcgcaggttatgattccggttacgattacgttgcagtcgcaggcccagccgaatacttccaacattggggtcagggaaccctcgtgaccgtgtccagtgctagcaccaaaggacctagtgtttttcctcttgccccttcctcaaagtctacctctggggggacagccgctctgggctgcctggtcaaggattatttcccagagcctgtcactgtcagttggaactctggagccttgacttctggtgttcatacatttcctgctgtccttcaaagcagcggcttgtactcattgtcttctgttgtgacagtaccctcaagcagcctcggcactcagacatacatctgcaatgtcaaccacaaaccctcaaatacaaaggtagataaaaaagtcgaaccaaagtcttgtgacaaaactcacacgtgcccaccgtgcccagcacctgaactcctggggggaccgtcagtcttcctcttccccccaaaacccaaggacaccctcatgatctcccggacccctgaggtcacatgcgtggtggtggacgtgagccacgaagaccctgaggtcaagttcaactggtacgtggacggcgtggaggtgcataatgccaagacaaagccgcgggaggagcagtacaacagcacgtaccgtgtggtcagcgtcctcaccgtcctgcaccaggactggctgaatggcaaggagtacaagtgcaaggtctccaacaaagccctcccagcccccatcgagaaaaccatctccaaagccaaagggcagccccgagaaccacaggtgtacaccctgcccccatgccgggaggagatgaccaagaaccaggtcagcctgtggtgcctggtcaaaggcttctatcccagcgacatcgccgtggagtgggagagcaatgggcagccggagaacaactacaagaccacgcctcccgtgctggactccgacggctccttcttcctctacagcaagctcaccgtggacaagagcaggtggcagcaggggaacgtcttctcatgctccgtgatgcatgaggctctgcacaaccactacacgcagaagagcctctccctgtctccgggtaaa

SEQ ID NO: 531 - DNA, 1743 bp, synthetic construct
  misc_feature 1..1743: note = nucleotide sequence coding EPB02 LC
  source 1..1743: mol_type = other DNA
gccatacagctgactcaatcaccttcttctttgagcgcctctgtcggtgatcgcgttacaattacatgccgagcttctcagtctatctctaataacctccactggtatctccagaaacctggacagtcaccacagcttctgatatattacggctttcagtctataagtggagtcccaagtagattttccggtagtggatctggcaccgattttactcttactatctctagcctccaacctgaagatttcgcaacctattactgccagcaggccaattcctggcccttgaccttcggaggtgggactaagctggaaatcaaacgtacggtggcagctcccagcgtttttatctttcccccagacatacagatgacacaaagtccaagtagcctttctgcatccgttggagaccgcgtaaccataacttgtcgagcatcacaaagcataagcacttggcttgcttggtatcagcagaagccaggcaaagcacccaagctgctgatttataaagcctctaatctccatacaggagttcccagccgtttctcaggcagcgggtctggaaccgaattctctctgaccatctctggcttgcaacctgatgactttgcaacatattactgtcaacaatataattcatatagtcgtactttcgggtgtggcactaaggtggaaatcaaacgtacggtggcagctcccagcgtttttatctttcccccatccgacgagcagctcaagagtggcactgcctctgtagtttgtttgctgaataacttctatccacgtgaagcaaaagtacagtggaaggtcgataatgcccttcagagcggtaacagccaagaaagtgttaccgagcaagattccaaagattccacttacagtctgtccagcacattgacactgagtaaggctgattacgaaaaacacaaggtgtacgcatgcgaggtgacacaccaaggtctttcatctcctgtaactaagagctttaaccggggagaatgtggtggtgggggcagcgggggcggaggtagtggaggcggcggtagtgaaccaaagagtagtgacaaaactcacacgtgcccaccgtgcccagcacctgaactcctggggggaccgtcagtcttcctcttccccccaaaacccaaggacaccctcatgatctcccggacccctgaggtcacatgcgtggtggtggacgtgagccacgaagaccctgaggtcaagttcaactggtacgtggacggcgtggaggtgcataatgccaagacaaagccgcgggaggagcagtacaacagcacgtaccgtgtggtcagcgtcctcaccgtcctgcaccaggactggctgaatggcaaggagtacaagtgcaaggtctccaacaaagccctcccagcccccatcgagaaaaccatctccaaagccaaagggcagccccgagaaccacaggtgtacaccctgcccccatgccgggaggagatgaccaagaaccaggtcagcctgtggtgcctggtcaaaggcttctatcccagcgacatcgccgtggagtgggagagcaatgggcagccggagaacaactacaagaccacgcctcccgtgctggactccgacggctccttcttcctctacagcaagctcaccgtggacaagagcaggtggcagcaggggaacgtcttctcatgctccgtgatgcatgaggctctgcacaaccactacacgcagaagagcctctccctgtctccgggtaaa

SEQ ID NO: 532 - DNA, 1758 bp, synthetic construct
  misc_feature 1..1758: note = nucleotide sequence coding EPB03 HC
  source 1..1758: mol_type = other DNA
caagtgcaactccttgaaagtggaggtggccttgtccagccaggcggttcactgcgtttgagctgtgccgcatccggctttaccttttccagttacacaatgagttgggtccgtcaagcacccgggcaagctttggaatggatgggaactatttcatctggtgggacttacacttactatcccgatagcgtcaagggacgttttaccataagccgggacaacgctaaaaattcactctatcttcagatgaacagtcttagggctgaggataccgctgtttattattgcgcccgagaagccattttcacctactgggggcgcggtacacttgtcaccgttagcagtgctagcaccaaaggacctagtgtttttcctcttgcccctgaggttcaactccttgaatccggaggaggacttgtccaaccaggcggcagccttaggctgtcctgcgctgcctcaggctttacattcagtcattacatgatggcctgggttagacaggcacccggcaaatgtctggaatgggtcagccgaataggaccatcaggaggtcccactcactatgccgattctgtaaaagggaggtttacaatttccagagacaattcaaagaataccctttacctccagatgaactcattgagagccgaggacacagccgtatattattgcgcaggttatgattccggttacgattacgttgcagtcgcaggcccagccgaatacttccaacattggggtcagggaaccctcgtgaccgtgtccagtgctagcaccaaaggacctagtgtttttcctcttgccccttcctcaaagtctacctctggggggacagccgctctgggctgcctggtcaaggattatttcccagagcctgtcactgtcagttggaactctggagccttgacttctggtgttcatacatttcctgctgtccttcaaagcagcggcttgtactcattgtcttctgttgtgacagtaccctcaagcagcctcggcactcagacatacatctgcaatgtcaaccacaaaccctcaaatacaaaggtagataaaaaagtcgaaccaaagtcttgtgacaaaactcacacgtgcccaccgtgcccagcacctgaactcctggggggaccgtcagtcttcctcttccccccaaaacccaaggacaccctcatgatctcccggacccctgaggtcacatgcgtggtggtggacgtgagccacgaagaccctgaggtcaagttcaactggtacgtggacggcgtggaggtgcataatgccaagacaaagccgcgggaggagcagtacaacagcacgtaccgtgtggtcagcgtcctcaccgtcctgcaccaggactggctgaatggcaaggagtacaagtgcaaggtctccaacaaagccctcccagcccccatcgagaaaaccatctccaaagccaaagggcagccccgagaaccacaggtgtacaccctgcccccatgccgggaggagatgaccaagaaccaggtcagcctgtggtgcctggtcaaaggcttctatcccagcgacatcgccgtggagtgggagagcaatgggcagccggagaacaactacaagaccacgcctcccgtgctggactccgacggctccttcttcctctacagcaagctcaccgtggacaagagcaggtggcagcaggggaacgtcttctcatgctccgtgatgcatgaggctctgcacaaccactacacgcagaagagcctctccctgtctccgggtaaa

SEQ ID NO: 533 - DNA, 1743 bp, synthetic construct
  misc_feature 1..1743: note = nucleotide sequence coding EPB03 LC
  source 1..1743: mol_type = other DNA
gacatacaactcacacaaagtccaagctctctttcccttagtccaggagaacgcgtaactctctcatgtaaagcctcccaggatatcaataactatctctcttggtaccaacaaaagcctgaccaagctcctaagctgcttatcaaacgcgccaatcggttggtagacggagttcccgacaggttcagtgggtcaggctcaggtacagattttaccttgaagatatcacgcgtggaagccgaagacgtaggggtatattattgtctgaaatatgacgagttcccctatacttttgggcaaggaactcgcctggaaataaaacgtacggtggcagctcccagcgtttttatctttcccccagacatacagatgacacaaagtccaagtagcctttctgcatccgttggagaccgcgtaaccataacttgtcgagcatcacaaagcataagcacttggcttgcttggtatcagcagaagccaggcaaagcacccaagctgctgatttataaagcctctaatctccatacaggagttcccagccgtttctcaggcagcgggtctggaaccgaattctctctgaccatctctggcttgcaacctgatgactttgcaacatattactgtcaacaatataattcatatagtcgtactttcgggtgtggcactaaggtggaaatcaaacgtacggtggcagctcccagcgtttttatctttcccccatccgacgagcagctcaagagtggcactgcctctgtagtttgtttgctgaataacttctatccacgtgaagcaaaagtacagtggaaggtcgataatgcccttcagagcggtaacagccaagaaagtgttaccgagcaagattccaaagattccacttacagtctgtccagcacattgacactgagtaaggctgattacgaaaaacacaaggtgtacgcatgcgaggtgacacaccaaggtctttcatctcctgtaactaagagctttaaccggggagaatgtggtggtgggggcagcgggggcggaggtagtggaggcggcggtagtgaaccaaagagtagtgacaaaactcacacgtgcccaccgtgcccagcacctgaactcctggggggaccgtcagtcttcctcttccccccaaaacccaaggacaccctcatgatctcccggacccctgaggtcacatgcgtggtggtggacgtgagccacgaagaccctgaggtcaagttcaactggtacgtggacggcgtggaggtgcataatgccaagacaaagccgcgggaggagcagtacaacagcacgtaccgtgtggtcagcgtcctcaccgtcctgcaccaggactggctgaatggcaaggagtacaagtgcaaggtctccaacaaagccctcccagcccccatcgagaaaaccatctccaaagccaaagggcagccccgagaaccacaggtgtacaccctgcccccatgccgggaggagatgaccaagaaccaggtcagcctgtggtgcctggtcaaaggcttctatcccagcgacatcgccgtggagtgggagagcaatgggcagccggagaacaactacaagaccacgcctcccgtgctggactccgacggctccttcttcctctacagcaagctcaccgtggacaagagcaggtggcagcaggggaacgtcttctcatgctccgtgatgcatgaggctctgcacaaccactacacgcagaagagcctctccctgtctccgggtaaa

SEQ ID NO: 534 - DNA, 1800 bp, synthetic construct
  misc_feature 1..1800: note = nucleotide sequence coding EPB04 HC
  source 1..1800: mol_type = other DNA
gaggttcaactccttgaatccggaggaggacttgtccaaccaggcggcagccttaggctgtcctgcgctgcctcaggctttacattcagtcattacatgatggcctgggttagacaggcacccggcaaaggtctggaatgggtcagccgaataggaccatcaggaggtcccactcactatgccgattctgtaaaagggaggtttacaatttccagagacaattcaaagaataccctttacctccagatgaactcattgagagccgaggacacagccgtatattattgcgcaggttatgattccggttacgattacgttgcagtcgcaggcccagccgaatacttccaacattggggtcagggaaccctcgtgaccgtgtccagtgctagcaccaaaggacctagtgtttttcctcttgcccctgaggtgcaactgcttgagtcaggaggaggactggttcaacccggcgggagccttcgactctcatgtgcagcctctgggtttacatttagtcgttaccaaatgatgtgggtacgccaggcccccggaaaatgtttggagtgggtgagcagcatttctccttcaggaggagtgacactttacgcagacagtgttaagggtcggttcacaatcagtcgtgataattccaagaacactctctatctccaaatgaactcccttcgagctgaggacactgctgtttattactgtactcgggaacttctcggcactgtggttgttcctgtggcttggaagatgcgtggatacttcgactattgggggcaactcactcttgttaccgtctcaagcgctagcaccaaaggacctagtgtttttcctcttgccccttcctcaaagtctacctctggggggacagccgctctgggctgcctggtcaaggattatttcccagagcctgtcactgtcagttggaactctggagccttgacttctggtgttcatacatttcctgctgtccttcaaagcagcggcttgtactcattgtcttctgttgtgacagtaccctcaagcagcctcggcactcagacatacatctgcaatgtcaaccacaaaccctcaaatacaaaggtagataaaaaagtcgaaccaaagtcttgtgacaaaactcacacgtgcccaccgtgcccagcacctgaactcctggggggaccgtcagtcttcctcttccccccaaaacccaaggacaccctcatgatctcccggacccctgaggtcacatgcgtggtggtggacgtgagccacgaagaccctgaggtcaagttcaactggtacgtggacggcgtggaggtgcataatgccaagacaaagccgcgggaggagcagtacaacagcacgtaccgtgtggtcagcgtcctcaccgtcctgcaccaggactggctgaatggcaaggagtacaagtgcaaggtctccaacaaagccctcccagcccccatcgagaaaaccatctccaaagccaaagggcagccccgagaaccacaggtgtacaccctgcccccatgccgggaggagatgaccaagaaccaggtcagcctgtggtgcctggtcaaaggcttctatcccagcgacatcgccgtggagtgggagagcaatgggcagccggagaacaactacaagaccacgcctcccgtgctggactccgacggctccttcttcctctacagcaagctcaccgtggacaagagcaggtggcagcaggggaacgtcttctcatgctccgtgatgcatgaggctctgcacaaccactacacgcagaagagcctctccctgtctccgggtaaa

SEQ ID NO: 535 - DNA, 1746 bp, synthetic construct
  misc_feature 1..1746: note = nucleotide sequence coding EPB04 LC
  source 1..1746: mol_type = other DNA
gacatacagatgacacaaagtccaagtagcctttctgcatccgttggagaccgcgtaaccataacttgtcgagcatcacaaagcataagcacttggcttgcttggtatcagcagaagccaggcaaagcacccaagctgctgatttataaagcctctaatctccatacaggagttcccagccgtttctcaggcagcgggtctggaaccgaattctctctgaccatctctggcttgcaacctgatgactttgcaacatattactgtcaacaatataattcatatagtcgtactttcgggcaaggcactaaggtggaaatcaaacgtacggtggcagctcccagcgtttttatctttcccccagacatacagatgactcagagccctggtacactgagtgtatctcctggggaacgcgccactctgtcttgccgagcctctcaaagcgttagttccaacctggcttggtatcagcaaaaacccggtcaagcacctcgcttgcttatctacggggcctccacacgggcaaccggcattcctgcacgctttagtggctctggtagcgggactgaattcactttgactatatcttccatgcagagtgaggatttcgccgtttattattgtcaacagtacaataactggcctccactcacttttggttgtggcaccaaagtggagataaagcgtacggtggcagctcccagcgtttttatctttcccccatccgacgagcagctcaagagtggcactgcctctgtagtttgtttgctgaataacttctatccacgtgaagcaaaagtacagtggaaggtcgataatgcccttcagagcggtaacagccaagaaagtgttaccgagcaagattccaaagattccacttacagtctgtccagcacattgacactgagtaaggctgattacgaaaaacacaaggtgtacgcatgcgaggtgacacaccaaggtctttcatctcctgtaactaagagctttaaccggggagaatgtggtggtgggggcagcgggggcggaggtagtggaggcggcggtagtgaaccaaagagtagtgacaaaactcacacgtgcccaccgtgcccagcacctgaactcctggggggaccgtcagtcttcctcttccccccaaaacccaaggacaccctcatgatctcccggacccctgaggtcacatgcgtggtggtggacgtgagccacgaagaccctgaggtcaagttcaactggtacgtggacggcgtggaggtgcataatgccaagacaaagccgcgggaggagcagtacaacagcacgtaccgtgtggtcagcgtcctcaccgtcctgcaccaggactggctgaatggcaaggagtacaagtgcaaggtctccaacaaagccctcccagcccccatcgagaaaaccatctccaaagccaaagggcagccccgagaaccacaggtgtacaccctgcccccatgccgggaggagatgaccaagaaccaggtcagcctgtggtgcctggtcaaaggcttctatcccagcgacatcgccgtggagtgggagagcaatgggcagccggagaacaactacaagaccacgcctcccgtgctggactccgacggctccttcttcctctacagcaagctcaccgtggacaagagcaggtggcagcaggggaacgtcttctcatgctccgtgatgcatgaggctctgcacaaccactacacgcagaagagcctctccctgtctccgggtaaa

SEQ ID NO: 536 - DNA, 1773 bp, synthetic construct
  misc_feature 1..1773: note = nucleotide sequence coding EPB05 HC
  source 1..1773: mol_type = other DNA
gaggttcaactccttgaatccggaggaggacttgtccaaccaggcggcagccttaggctgtcctgcgctgcctcaggctttacattcagtcattacatgatggcctgggttagacaggcacccggcaaaggtctggaatgggtcagccgaataggaccatcaggaggtcccactcactatgccgattctgtaaaagggaggtttacaatttccagagacaattcaaagaataccctttacctccagatgaactcattgagagccgaggacacagccgtatattattgcgcaggttatgattccggttacgattacgttgcagtcgcaggcccagccgaatacttccaacattggggtcagggaaccctcgtgaccgtgtccagtgctagcaccaaaggacctagtgtttttcctcttgcccctgaggtccagctggttgagtctggaggtggtgtagtcaggccaggaggttccctgcgtctgtcttgcgctgcctctgggttcactgtgtctgactacagtatgaactgggttagacaggctccagggaaatgtttggaatggatagggtttattcgcaataaagccaatgcctataccaccgaatacagcgcaagcgttaaaggcaggttcaccatcagtagggacgactctaagaataccctctacctgcagatgaatagcttgaagacagaggataccgctgtttattactgcactacctaccccaggtatcatgctatggacagttggggtcaaggaactatggtcaccgtctcctctgctagcaccaaaggacctagtgtttttcctcttgccccttcctcaaagtctacctctggggggacagccgctctgggctgcctggtcaaggattatttcccagagcctgtcactgtcagttggaactctggagccttgacttctggtgttcatacatttcctgctgtccttcaaagcagcggcttgtactcattgtcttctgttgtgacagtaccctcaagcagcctcggcactcagacatacatctgcaatgtcaaccacaaaccctcaaatacaaaggtagataaaaaagtcgaaccaaagtcttgtgacaaaactcacacgtgcccaccgtgcccagcacctgaactcctggggggaccgtcagtcttcctcttccccccaaaacccaaggacaccctcatgatctcccggacccctgaggtcacatgcgtggtggtggacgtgagccacgaagaccctgaggtcaagttcaactggtacgtggacggcgtggaggtgcataatgccaagacaaagccgcgggaggagcagtacaacagcacgtaccgtgtggtcagcgtcctcaccgtcctgcaccaggactggctgaatggcaaggagtacaagtgcaaggtctccaacaaagccctcccagcccccatcgagaaaaccatctccaaagccaaagggcagccccgagaaccacaggtgtacaccctgcccccatgccgggaggagatgaccaagaaccaggtcagcctgtggtgcctggtcaaaggcttctatcccagcgacatcgccgtggagtgggagagcaatgggcagccggagaacaactacaagaccacgcctcccgtgctggactccgacggctccttcttcctctacagcaagctcaccgtggacaagagcaggtggcagcaggggaacgtcttctcatgctccgtgatgcatgaggctctgcacaaccactacacgcagaagagcctctccctgtctccgggtaaa

SEQ ID NO: 537 - DNA, 1743 bp, synthetic construct
  misc_feature 1..1743: note = nucleotide sequence coding EPB05 LC
  source 1..1743: mol_type = other DNA
gacatacagatgacacaaagtccaagtagcctttctgcatccgttggagaccgcgtaaccataacttgtcgagcatcacaaagcataagcacttggcttgcttggtatcagcagaagccaggcaaagcacccaagctgctgatttataaagcctctaatctccatacaggagttcccagccgtttctcaggcagcgggtctggaaccgaattctctctgaccatctctggcttgcaacctgatgactttgcaacatattactgtcaacaatataattcatatagtcgtactttcgggcaaggcactaaggtggaaatcaaacgtacggtggcagctcccagcgtttttatctttcccccagccatacagctgactcaatcaccttcttctttgagcgcctctgtcggtgatcgcgttacaattacatgccgagcttctcagtctatctctaataacctccactggtatctccagaaacctggacagtcaccacagcttctgatatattacggctttcagtctataagtggagtcccaagtagattttccggtagtggatctggcaccgattttactcttactatctctagcctccaacctgaagatttcgcaacctattactgccagcaggccaattcctggcccttgaccttcggatgtgggactaagctggaaatcaaacgtacggtggcagctcccagcgtttttatctttcccccatccgacgagcagctcaagagtggcactgcctctgtagtttgtttgctgaataacttctatccacgtgaagcaaaagtacagtggaaggtcgataatgcccttcagagcggtaacagccaagaaagtgttaccgagcaagattccaaagattccacttacagtctgtccagcacattgacactgagtaaggctgattacgaaaaacacaaggtgtacgcatgcgaggtgacacaccaaggtctttcatctcctgtaactaagagctttaaccggggagaatgtggtggtgggggcagcgggggcggaggtagtggaggcggcggtagtgaaccaaagagtagtgacaaaactcacacgtgcccaccgtgcccagcacctgaactcctggggggaccgtcagtcttcctcttccccccaaaacccaaggacaccctcatgatctcccggacccctgaggtcacatgcgtggtggtggacgtgagccacgaagaccctgaggtcaagttcaactggtacgtggacggcgtggaggtgcataatgccaagacaaagccgcgggaggagcagtacaacagcacgtaccgtgtggtcagcgtcctcaccgtcctgcaccaggactggctgaatggcaaggagtacaagtgcaaggtctccaacaaagccctcccagcccccatcgagaaaaccatctccaaagccaaagggcagccccgagaaccacaggtgtacaccctgcccccatgccgggaggagatgaccaagaaccaggtcagcctgtggtgcctggtcaaaggcttctatcccagcgacatcgccgtggagtgggagagcaatgggcagccggagaacaactacaagaccacgcctcccgtgctggactccgacggctccttcttcctctacagcaagctcaccgtggacaagagcaggtggcagcaggggaacgtcttctcatgctccgtgatgcatgaggctctgcacaaccactacacgcagaagagcctctccctgtctccgggtaaa

SEQ ID NO: 538 - DNA, 1758 bp, synthetic construct
  misc_feature 1..1758: note = nucleotide sequence coding EPB06 HC
  source 1..1758: mol_type = other DNA
gaggttcaactccttgaatccggaggaggacttgtccaaccaggcggcagccttaggctgtcctgcgctgcctcaggctttacattcagtcattacatgatggcctgggttagacaggcacccggcaaaggtctggaatgggtcagccgaataggaccatcaggaggtcccactcactatgccgattctgtaaaagggaggtttacaatttccagagacaattcaaagaataccctttacctccagatgaactcattgagagccgaggacacagccgtatattattgcgcaggttatgattccggttacgattacgttgcagtcgcaggcccagccgaatacttccaacattggggtcagggaaccctcgtgaccgtgtccagtgctagcaccaaaggacctagtgtttttcctcttgcccctcaagtgcaactccttgaaagtggaggtggccttgtccagccaggcggttcactgcgtttgagctgtgccgcatccggctttaccttttccagttacacaatgagttgggtccgtcaagcacccgggcaatgtttggaatggatgggaactatttcatctggtgggacttacacttactatcccgatagcgtcaagggacgttttaccataagccgggacaacgctaaaaattcactctatcttcagatgaacagtcttagggctgaggataccgctgtttattattgcgcccgagaagccattttcacctactgggggcgcggtacacttgtcaccgttagcagtgctagcaccaaaggacctagtgtttttcctcttgccccttcctcaaagtctacctctggggggacagccgctctgggctgcctggtcaaggattatttcccagagcctgtcactgtcagttggaactctggagccttgacttctggtgttcatacatttcctgctgtccttcaaagcagcggcttgtactcattgtcttctgttgtgacagtaccctcaagcagcctcggcactcagacatacatctgcaatgtcaaccacaaaccctcaaatacaaaggtagataaaaaagtcgaaccaaagtcttgtgacaaaactcacacgtgcccaccgtgcccagcacctgaactcctggggggaccgtcagtcttcctcttccccccaaaacccaaggacaccctcatgatctcccggacccctgaggtcacatgcgtggtggtggacgtgagccacgaagaccctgaggtcaagttcaactggtacgtggacggcgtggaggtgcataatgccaagacaaagccgcgggaggagcagtacaacagcacgtaccgtgtggtcagcgtcctcaccgtcctgcaccaggactggctgaatggcaaggagtacaagtgcaaggtctccaacaaagccctcccagcccccatcgagaaaaccatctccaaagccaaagggcagccccgagaaccacaggtgtacaccctgcccccatgccgggaggagatgaccaagaaccaggtcagcctgtggtgcctggtcaaaggcttctatcccagcgacatcgccgtggagtgggagagcaatgggcagccggagaacaactacaagaccacgcctcccgtgctggactccgacggctccttcttcctctacagcaagctcaccgtggacaagagcaggtggcagcaggggaacgtcttctcatgctccgtgatgcatgaggctctgcacaaccactacacgcagaagagcctctccctgtctccgggtaaa

SEQ ID NO: 539 - DNA, 1743 bp, synthetic construct
  misc_feature 1..1743: note = nucleotide sequence coding EPB06 LC
  source 1..1743: mol_type = other DNA
gacatacagatgacacaaagtccaagtagcctttctgcatccgttggagaccgcgtaaccataacttgtcgagcatcacaaagcataagcacttggcttgcttggtatcagcagaagccaggcaaagcacccaagctgctgatttataaagcctctaatctccatacaggagttcccagccgtttctcaggcagcgggtctggaaccgaattctctctgaccatctctggcttgcaacctgatgactttgcaacatattactgtcaacaatataattcatatagtcgtactttcgggcaaggcactaaggtggaaatcaaacgtacggtggcagctcccagcgtttttatctttcccccagacatacaactcacacaaagtccaagctctctttcccttagtccaggagaacgcgtaactctctcatgtaaagcctcccaggatatcaataactatctctcttggtaccaacaaaagcctgaccaagctcctaagctgcttatcaaacgcgccaatcggttggtagacggagttcccgacaggttcagtgggtcaggctcaggtacagattttaccttgaagatatcacgcgtggaagccgaagacgtaggggtatattattgtctgaaatatgacgagttcccctatacttttgggtgtggaactcgcctggaaataaaacgtacggtggcagctcccagcgtttttatctttcccccatccgacgagcagctcaagagtggcactgcctctgtagtttgtttgctgaataacttctatccacgtgaagcaaaagtacagtggaaggtcgataatgcccttcagagcggtaacagccaagaaagtgttaccgagcaagattccaaagattccacttacagtctgtccagcacattgacactgagtaaggctgattacgaaaaacacaaggtgtacgcatgcgaggtgacacaccaaggtctttcatctcctgtaactaagagctttaaccggggagaatgtggtggtgggggcagcgggggcggaggtagtggaggcggcggtagtgaaccaaagagtagtgacaaaactcacacgtgcccaccgtgcccagcacctgaactcctggggggaccgtcagtcttcctcttccccccaaaacccaaggacaccctcatgatctcccggacccctgaggtcacatgcgtggtggtggacgtgagccacgaagaccctgaggtcaagttcaactggtacgtggacggcgtggaggtgcataatgccaagacaaagccgcgggaggagcagtacaacagcacgtaccgtgtggtcagcgtcctcaccgtcctgcaccaggactggctgaatggcaaggagtacaagtgcaaggtctccaacaaagccctcccagcccccatcgagaaaaccatctccaaagccaaagggcagccccgagaaccacaggtgtacaccctgcccccatgccgggaggagatgaccaagaaccaggtcagcctgtggtgcctggtcaaaggcttctatcccagcgacatcgccgtggagtgggagagcaatgggcagccggagaacaactacaagaccacgcctcccgtgctggactccgacggctccttcttcctctacagcaagctcaccgtggacaagagcaggtggcagcaggggaacgtcttctcatgctccgtgatgcatgaggctctgcacaaccactacacgcagaagagcctctccctgtctccgggtaaa

SEQ ID NO: 540 - DNA, 1776 bp, synthetic construct
  misc_feature 1..1776: note = nucleotide sequence coding EPB07 HC
  source 1..1776: mol_type = other DNA
gaggtccagctggttgagtctggaggtggtgtagtcaggccaggaggttccctgcgtctgtcttgcgctgcctctgggttcactgtgtctgactacagtatgaactgggttagacaggctccagggaaaggtttggaatggatagggtttattcgcaataaagccaatgcctataccaccgaatacagcgcaagcgttaaaggcaggttcaccatcagtagggacgactctaagaataccctctacctgcagatgaatagcttgaagacagaggataccgctgtttattactgcactacctaccccaggtatcatgctatggacagttggggtcaaggaactatggtcaccgtctcctctgctagcaccaaaggacctagtgtttttcctcttgcccctgaggtgcaactgcttgagtcaggaggaggactggttcaacccggcgggagccttcgactctcatgtgcagcctctgggtttacatttagtcgttaccaaatgatgtgggtacgccaggcccccggaaaatgtttggagtgggtgagcagcatttctccttcaggaggagtgacactttacgcagacagtgttaagggtcggttcacaatcagtcgtgataattccaagaacactctctatctccaaatgaactcccttcgagctgaggacactgctgtttattactgtactcgggaacttctcggcactgtggttgttcctgtggcttggaagatgcgtggatacttcgactattgggggcaactcactcttgttaccgtctcaagcgctagcaccaaaggacctagtgtttttcctcttgccccttcctcaaagtctacctctggggggacagccgctctgggctgcctggtcaaggattatttcccagagcctgtcactgtcagttggaactctggagccttgacttctggtgttcatacatttcctgctgtccttcaaagcagcggcttgtactcattgtcttctgttgtgacagtaccctcaagcagcctcggcactcagacatacatctgcaatgtcaaccacaaaccctcaaatacaaaggtagataaaaaagtcgaaccaaagtcttgtgacaaaactcacacgtgcccaccgtgcccagcacctgaactcctggggggaccgtcagtcttcctcttccccccaaaacccaaggacaccctcatgatctcccggacccctgaggtcacatgcgtggtggtggacgtgagccacgaagaccctgaggtcaagttcaactggtacgtggacggcgtggaggtgcataatgccaagacaaagccgcgggaggagcagtacaacagcacgtaccgtgtggtcagcgtcctcaccgtcctgcaccaggactggctgaatggcaaggagtacaagtgcaaggtctccaacaaagccctcccagcccccatcgagaaaaccatctccaaagccaaagggcagccccgagaaccacaggtgtacaccctgcccccatgccgggaggagatgaccaagaaccaggtcagcctgtggtgcctggtcaaaggcttctatcccagcgacatcgccgtggagtgggagagcaatgggcagccggagaacaactacaagaccacgcctcccgtgctggactccgacggctccttcttcctctacagcaagctcaccgtggacaagagcaggtggcagcaggggaacgtcttctcatgctccgtgatgcatgaggctctgcacaaccactacacgcagaagagcctctccctgtctccgggtaaa

SEQ ID NO: 541 - DNA, 1746 bp, synthetic construct
  misc_feature 1..1746: note = nucleotide sequence coding EPB07 LC
  source 1..1746: mol_type = other DNA
gccatacagctgactcaatcaccttcttctttgagcgcctctgtcggtgatcgcgttacaattacatgccgagcttctcagtctatctctaataacctccactggtatctccagaaacctggacagtcaccacagcttctgatatattacggctttcagtctataagtggagtcccaagtagattttccggtagtggatctggcaccgattttactcttactatctctagcctccaacctgaagatttcgcaacctattactgccagcaggccaattcctggcccttgaccttcggaggtgggactaagctggaaatcaaacgtacggtggcagctcccagcgtttttatctttcccccagacatacagatgactcagagccctggtacactgagtgtatctcctggggaacgcgccactctgtcttgccgagcctctcaaagcgttagttccaacctggcttggtatcagcaaaaacccggtcaagcacctcgcttgcttatctacggggcctccacacgggcaaccggcattcctgcacgctttagtggctctggtagcgggactgaattcactttgactatatcttccatgcagagtgaggatttcgccgtttattattgtcaacagtacaataactggcctccactcacttttggttgtggcaccaaagtggagataaagcgtacggtggcagctcccagcgtttttatctttcccccatccgacgagcagctcaagagtggcactgcctctgtagtttgtttgctgaataacttctatccacgtgaagcaaaagtacagtggaaggtcgataatgcccttcagagcggtaacagccaagaaagtgttaccgagcaagattccaaagattccacttacagtctgtccagcacattgacactgagtaaggctgattacgaaaaacacaaggtgtacgcatgcgaggtgacacaccaaggtctttcatctcctgtaactaagagctttaaccggggagaatgtggtggtgggggcagcgggggcggaggtagtggaggcggcggtagtgaaccaaagagtagtgacaaaactcacacgtgcccaccgtgcccagcacctgaactcctggggggaccgtcagtcttcctcttccccccaaaacccaaggacaccctcatgatctcccggacccctgaggtcacatgcgtggtggtggacgtgagccacgaagaccctgaggtcaagttcaactggtacgtggacggcgtggaggtgcataatgccaagacaaagccgcgggaggagcagtacaacagcacgtaccgtgtggtcagcgtcctcaccgtcctgcaccaggactggctgaatggcaaggagtacaagtgcaaggtctccaacaaagccctcccagcccccatcgagaaaaccatctccaaagccaaagggcagccccgagaaccacaggtgtacaccctgcccccatgccgggaggagatgaccaagaaccaggtcagcctgtggtgcctggtcaaaggcttctatcccagcgacatcgccgtggagtgggagagcaatgggcagccggagaacaactacaagaccacgcctcccgtgctggactccgacggctccttcttcctctacagcaagctcaccgtggacaagagcaggtggcagcaggggaacgtcttctcatgctccgtgatgcatgaggctctgcacaaccactacacgcagaagagcctctccctgtctccgggtaaa

SEQ ID NO: 542 - DNA, 1761 bp, synthetic construct
  misc_feature 1..1761: note = nucleotide sequence coding EPB08 HC
  source 1..1761: mol_type = other DNA
caagtgcaactccttgaaagtggaggtggccttgtccagccaggcggttcactgcgtttgagctgtgccgcatccggctttaccttttccagttacacaatgagttgggtccgtcaagcacccgggcaagctttggaatggatgggaactatttcatctggtgggacttacacttactatcccgatagcgtcaagggacgttttaccataagccgggacaacgctaaaaattcactctatcttcagatgaacagtcttagggctgaggataccgctgtttattattgcgcccgagaagccattttcacctactgggggcgcggtacacttgtcaccgttagcagtgctagcaccaaaggacctagtgtttttcctcttgcccctgaggtgcaactgcttgagtcaggaggaggactggttcaacccggcgggagccttcgactctcatgtgcagcctctgggtttacatttagtcgttaccaaatgatgtgggtacgccaggcccccggaaaatgtttggagtgggtgagcagcatttctccttcaggaggagtgacactttacgcagacagtgttaagggtcggttcacaatcagtcgtgataattccaagaacactctctatctccaaatgaactcccttcgagctgaggacactgctgtttattactgtactcgggaacttctcggcactgtggttgttcctgtggcttggaagatgcgtggatacttcgactattgggggcaactcactcttgttaccgtctcaagcgctagcaccaaaggacctagtgtttttcctcttgccccttcctcaaagtctacctctggggggacagccgctctgggctgcctggtcaaggattatttcccagagcctgtcactgtcagttggaactctggagccttgacttctggtgttcatacatttcctgctgtccttcaaagcagcggcttgtactcattgtcttctgttgtgacagtaccctcaagcagcctcggcactcagacatacatctgcaatgtcaaccacaaaccctcaaatacaaaggtagataaaaaagtcgaaccaaagtcttgtgacaaaactcacacgtgcccaccgtgcccagcacctgaactcctggggggaccgtcagtcttcctcttccccccaaaacccaaggacaccctcatgatctcccggacccctgaggtcacatgcgtggtggtggacgtgagccacgaagaccctgaggtcaagttcaactggtacgtggacggcgtggaggtgcataatgccaagacaaagccgcgggaggagcagtacaacagcacgtaccgtgtggtcagcgtcctcaccgtcctgcaccaggactggctgaatggcaaggagtacaagtgcaaggtctccaacaaagccctcccagcccccatcgagaaaaccatctccaaagccaaagggcagccccgagaaccacaggtgtacaccctgcccccatgccgggaggagatgaccaagaaccaggtcagcctgtggtgcctggtcaaaggcttctatcccagcgacatcgccgtggagtgggagagcaatgggcagccggagaacaactacaagaccacgcctcccgtgctggactccgacggctccttcttcctctacagcaagctcaccgtggacaagagcaggtggcagcaggggaacgtcttctcatgctccgtgatgcatgaggctctgcacaaccactacacgcagaagagcctctccctgtctccgggtaaa

SEQ ID NO: 543 - DNA, 1746 bp, synthetic construct
  misc_feature 1..1746: note = nucleotide sequence coding EPB08 LC
  source 1..1746: mol_type = other DNA
gacatacaactcacacaaagtccaagctctctttcccttagtccaggagaacgcgtaactctctcatgtaaagcctcccaggatatcaataactatctctcttggtaccaacaaaagcctgaccaagctcctaagctgcttatcaaacgcgccaatcggttggtagacggagttcccgacaggttcagtgggtcaggctcaggtacagattttaccttgaagatatcacgcgtggaagccgaagacgtaggggtatattattgtctgaaatatgacgagttcccctatacttttgggcaaggaactcgcctggaaataaaacgtacggtggcagctcccagcgtttttatctttcccccagacatacagatgactcagagccctggtacactgagtgtatctcctggggaacgcgccactctgtcttgccgagcctctcaaagcgttagttccaacctggcttggtatcagcaaaaacccggtcaagcacctcgcttgcttatctacggggcctccacacgggcaaccggcattcctgcacgctttagtggctctggtagcgggactgaattcactttgactatatcttccatgcagagtgaggatttcgccgtttattattgtcaacagtacaataactggcctccactcacttttggttgtggcaccaaagtggagataaagcgtacggtggcagctcccagcgtttttatctttcccccatccgacgagcagctcaagagtggcactgcctctgtagtttgtttgctgaataacttctatccacgtgaagcaaaagtacagtggaaggtcgataatgcccttcagagcggtaacagccaagaaagtgttaccgagcaagattccaaagattccacttacagtctgtccagcacattgacactgagtaaggctgattacgaaaaacacaaggtgtacgcatgcgaggtgacacaccaaggtctttcatctcctgtaactaagagctttaaccggggagaatgtggtggtgggggcagcgggggcggaggtagtggaggcggcggtagtgaaccaaagagtagtgacaaaactcacacgtgcccaccgtgcccagcacctgaactcctggggggaccgtcagtcttcctcttccccccaaaacccaaggacaccctcatgatctcccggacccctgaggtcacatgcgtggtggtggacgtgagccacgaagaccctgaggtcaagttcaactggtacgtggacggcgtggaggtgcataatgccaagacaaagccgcgggaggagcagtacaacagcacgtaccgtgtggtcagcgtcctcaccgtcctgcaccaggactggctgaatggcaaggagtacaagtgcaaggtctccaacaaagccctcccagcccccatcgagaaaaccatctccaaagccaaagggcagccccgagaaccacaggtgtacaccctgcccccatgccgggaggagatgaccaagaaccaggtcagcctgtggtgcctggtcaaaggcttctatcccagcgacatcgccgtggagtgggagagcaatgggcagccggagaacaactacaagaccacgcctcccgtgctggactccgacggctccttcttcctctacagcaagctcaccgtggacaagagcaggtggcagcaggggaacgtcttctcatgctccgtgatgcatgaggctctgcacaaccactacacgcagaagagcctctccctgtctccgggtaaa

SEQ ID NO: 544 - DNA, 1776 bp, synthetic construct
  misc_feature 1..1776: note = nucleotide sequence coding EPB09 HC
  source 1..1776: mol_type = other DNA
gaggtgcaactgcttgagtcaggaggaggactggttcaacccggcgggagccttcgactctcatgtgcagcctctgggtttacatttagtcgttaccaaatgatgtgggtacgccaggcccccggaaaaggtttggagtgggtgagcagcatttctccttcaggaggagtgacactttacgcagacagtgttaagggtcggttcacaatcagtcgtgataattccaagaacactctctatctccaaatgaactcccttcgagctgaggacactgctgtttattactgtactcgggaacttctcggcactgtggttgttcctgtggcttggaagatgcgtggatacttcgactattgggggcaactcactcttgttaccgtctcaagcgctagcaccaaaggacctagtgtttttcctcttgcccctgaggtccagctggttgagtctggaggtggtgtagtcaggccaggaggttccctgcgtctgtcttgcgctgcctctgggttcactgtgtctgactacagtatgaactgggttagacaggctccagggaaatgtttggaatggatagggtttattcgcaataaagccaatgcctataccaccgaatacagcgcaagcgttaaaggcaggttcaccatcagtagggacgactctaagaataccctctacctgcagatgaatagcttgaagacagaggataccgctgtttattactgcactacctaccccaggtatcatgctatggacagttggggtcaaggaactatggtcaccgtctcctctgctagcaccaaaggacctagtgtttttcctcttgccccttcctcaaagtctacctctggggggacagccgctctgggctgcctggtcaaggattatttcccagagcctgtcactgtcagttggaactctggagccttgacttctggtgttcatacatttcctgctgtccttcaaagcagcggcttgtactcattgtcttctgttgtgacagtaccctcaagcagcctcggcactcagacatacatctgcaatgtcaaccacaaaccctcaaatacaaaggtagataaaaaagtcgaaccaaagtcttgtgacaaaactcacacgtgcccaccgtgcccagcacctgaactcctggggggaccgtcagtcttcctcttccccccaaaacccaaggacaccctcatgatctcccggacccctgaggtcacatgcgtggtggtggacgtgagccacgaagaccctgaggtcaagttcaactggtacgtggacggcgtggaggtgcataatgccaagacaaagccgcgggaggagcagtacaacagcacgtaccgtgtggtcagcgtcctcaccgtcctgcaccaggactggctgaatggcaaggagtacaagtgcaaggtctccaacaaagccctcccagcccccatcgagaaaaccatctccaaagccaaagggcagccccgagaaccacaggtgtacaccctgcccccatgccgggaggagatgaccaagaaccaggtcagcctgtggtgcctggtcaaaggcttctatcccagcgacatcgccgtggagtgggagagcaatgggcagccggagaacaactacaagaccacgcctcccgtgctggactccgacggctccttcttcctctacagcaagctcaccgtggacaagagcaggtggcagcaggggaacgtcttctcatgctccgtgatgcatgaggctctgcacaaccactacacgcagaagagcctctccctgtctccgggtaaa

SEQ ID NO: 545 - DNA, 1746 bp, synthetic construct
  misc_feature 1..1746: note = nucleotide sequence coding EPB09 LC
  source 1..1746: mol_type = other DNA
gacatacagatgactcagagccctggtacactgagtgtatctcctggggaacgcgccactctgtcttgccgagcctctcaaagcgttagttccaacctggcttggtatcagcaaaaacccggtcaagcacctcgcttgcttatctacggggcctccacacgggcaaccggcattcctgcacgctttagtggctctggtagcgggactgaattcactttgactatatcttccatgcagagtgaggatttcgccgtttattattgtcaacagtacaataactggcctccactcacttttggtggtggcaccaaagtggagataaagcgtacggtggcagctcccagcgtttttatctttcccccagccatacagctgactcaatcaccttcttctttgagcgcctctgtcggtgatcgcgttacaattacatgccgagcttctcagtctatctctaataacctccactggtatctccagaaacctggacagtcaccacagcttctgatatattacggctttcagtctataagtggagtcccaagtagattttccggtagtggatctggcaccgattttactcttactatctctagcctccaacctgaagatttcgcaacctattactgccagcaggccaattcctggcccttgaccttcggatgtgggactaagctggaaatcaaacgtacggtggcagctcccagcgtttttatctttcccccatccgacgagcagctcaagagtggcactgcctctgtagtttgtttgctgaataacttctatccacgtgaagcaaaagtacagtggaaggtcgataatgcccttcagagcggtaacagccaagaaagtgttaccgagcaagattccaaagattccacttacagtctgtccagcacattgacactgagtaaggctgattacgaaaaacacaaggtgtacgcatgcgaggtgacacaccaaggtctttcatctcctgtaactaagagctttaaccggggagaatgtggtggtgggggcagcgggggcggaggtagtggaggcggcggtagtgaaccaaagagtagtgacaaaactcacacgtgcccaccgtgcccagcacctgaactcctggggggaccgtcagtcttcctcttccccccaaaacccaaggacaccctcatgatctcccggacccctgaggtcacatgcgtggtggtggacgtgagccacgaagaccctgaggtcaagttcaactggtacgtggacggcgtggaggtgcataatgccaagacaaagccgcgggaggagcagtacaacagcacgtaccgtgtggtcagcgtcctcaccgtcctgcaccaggactggctgaatggcaaggagtacaagtgcaaggtctccaacaaagccctcccagcccccatcgagaaaaccatctccaaagccaaagggcagccccgagaaccacaggtgtacaccctgcccccatgccgggaggagatgaccaagaaccaggtcagcctgtggtgcctggtcaaaggcttctatcccagcgacatcgccgtggagtgggagagcaatgggcagccggagaacaactacaagaccacgcctcccgtgctggactccgacggctccttcttcctctacagcaagctcaccgtggacaagagcaggtggcagcaggggaacgtcttctcatgctccgtgatgcatgaggctctgcacaaccactacacgcagaagagcctctccctgtctccgggtaaa

SEQ ID NO: 546 - DNA, 1734 bp, synthetic construct
  misc_feature 1..1734: note = nucleotide sequence coding EPB10 HC
  source 1..1734: mol_type = other DNA
caagtgcaactccttgaaagtggaggtggccttgtccagccaggcggttcactgcgtttgagctgtgccgcatccggctttaccttttccagttacacaatgagttgggtccgtcaagcacccgggcaagctttggaatggatgggaactatttcatctggtgggacttacacttactatcccgatagcgtcaagggacgttttaccataagccgggacaacgctaaaaattcactctatcttcagatgaacagtcttagggctgaggataccgctgtttattattgcgcccgagaagccattttcacctactgggggcgcggtacacttgtcaccgttagcagtgctagcaccaaaggacctagtgtttttcctcttgcccctgaggtccagctggttgagtctggaggtggtgtagtcaggccaggaggttccctgcgtctgtcttgcgctgcctctgggttcactgtgtctgactacagtatgaactgggttagacaggctccagggaaatgtttggaatggatagggtttattcgcaataaagccaatgcctataccaccgaatacagcgcaagcgttaaaggcaggttcaccatcagtagggacgactctaagaataccctctacctgcagatgaatagcttgaagacagaggataccgctgtttattactgcactacctaccccaggtatcatgctatggacagttggggtcaaggaactatggtcaccgtctcctctgctagcaccaaaggacctagtgtttttcctcttgccccttcctcaaagtctacctctggggggacagccgctctgggctgcctggtcaaggattatttcccagagcctgtcactgtcagttggaactctggagccttgacttctggtgttcatacatttcctgctgtccttcaaagcagcggcttgtactcattgtcttctgttgtgacagtaccctcaagcagcctcggcactcagacatacatctgcaatgtcaaccacaaaccctcaaatacaaaggtagataaaaaagtcgaaccaaagtcttgtgacaaaactcacacgtgcccaccgtgcccagcacctgaactcctggggggaccgtcagtcttcctcttccccccaaaacccaaggacaccctcatgatctcccggacccctgaggtcacatgcgtggtggtggacgtgagccacgaagaccctgaggtcaagttcaactggtacgtggacggcgtggaggtgcataatgccaagacaaagccgcgggaggagcagtacaacagcacgtaccgtgtggtcagcgtcctcaccgtcctgcaccaggactggctgaatggcaaggagtacaagtgcaaggtctccaacaaagccctcccagcccccatcgagaaaaccatctccaaagccaaagggcagccccgagaaccacaggtgtacaccctgcccccatgccgggaggagatgaccaagaaccaggtcagcctgtggtgcctggtcaaaggcttctatcccagcgacatcgccgtggagtgggagagcaatgggcagccggagaacaactacaagaccacgcctcccgtgctggactccgacggctccttcttcctctacagcaagctcaccgtggacaagagcaggtggcagcaggggaacgtcttctcatgctccgtgatgcatgaggctctgcacaaccactacacgcagaagagcctctccctgtctccgggtaaa

SEQ ID NO: 547 - DNA, 1743 bp, synthetic construct
  misc_feature 1..1743: note = nucleotide sequence coding EPB10 LC
  source 1..1743: mol_type = other DNA
gacatacaactcacacaaagtccaagctctctttcccttagtccaggagaacgcgtaactctctcatgtaaagcctcccaggatatcaataactatctctcttggtaccaacaaaagcctgaccaagctcctaagctgcttatcaaacgcgccaatcggttggtagacggagttcccgacaggttcagtgggtcaggctcaggtacagattttaccttgaagatatcacgcgtggaagccgaagacgtaggggtatattattgtctgaaatatgacgagttcccctatacttttgggcaaggaactcgcctggaaataaaacgtacggtggcagctcccagcgtttttatctttcccccagccatacagctgactcaatcaccttcttctttgagcgcctctgtcggtgatcgcgttacaattacatgccgagcttctcagtctatctctaataacctccactggtatctccagaaacctggacagtcaccacagcttctgatatattacggctttcagtctataagtggagtcccaagtagattttccggtagtggatctggcaccgattttactcttactatctctagcctccaacctgaagatttcgcaacctattactgccagcaggccaattcctggcccttgaccttcggatgtgggactaagctggaaatcaaacgtacggtggcagctcccagcgtttttatctttcccccatccgacgagcagctcaagagtggcactgcctctgtagtttgtttgctgaataacttctatccacgtgaagcaaaagtacagtggaaggtcgataatgcccttcagagcggtaacagccaagaaagtgttaccgagcaagattccaaagattccacttacagtctgtccagcacattgacactgagtaaggctgattacgaaaaacacaaggtgtacgcatgcgaggtgacacaccaaggtctttcatctcctgtaactaagagctttaaccggggagaatgtggtggtgggggcagcgggggcggaggtagtggaggcggcggtagtgaaccaaagagtagtgacaaaactcacacgtgcccaccgtgcccagcacctgaactcctggggggaccgtcagtcttcctcttccccccaaaacccaaggacaccctcatgatctcccggacccctgaggtcacatgcgtggtggtggacgtgagccacgaagaccctgaggtcaagttcaactggtacgtggacggcgtggaggtgcataatgccaagacaaagccgcgggaggagcagtacaacagcacgtaccgtgtggtcagcgtcctcaccgtcctgcaccaggactggctgaatggcaaggagtacaagtgcaaggtctccaacaaagccctcccagcccccatcgagaaaaccatctccaaagccaaagggcagccccgagaaccacaggtgtacaccctgcccccatgccgggaggagatgaccaagaaccaggtcagcctgtggtgcctggtcaaaggcttctatcccagcgacatcgccgtggagtgggagagcaatgggcagccggagaacaactacaagaccacgcctcccgtgctggactccgacggctccttcttcctctacagcaagctcaccgtggacaagagcaggtggcagcaggggaacgtcttctcatgctccgtgatgcatgaggctctgcacaaccactacacgcagaagagcctctccctgtctccgggtaaa

SEQ ID NO: 548 - DNA, 1761 bp, synthetic construct
  misc_feature 1..1761: note = nucleotide sequence coding EPB11 HC
  source 1..1761: mol_type = other DNA
gaggtgcaactgcttgagtcaggaggaggactggttcaacccggcgggagccttcgactctcatgtgcagcctctgggtttacatttagtcgttaccaaatgatgtgggtacgccaggcccccggaaaaggtttggagtgggtgagcagcatttctccttcaggaggagtgacactttacgcagacagtgttaagggtcggttcacaatcagtcgtgataattccaagaacactctctatctccaaatgaactcccttcgagctgaggacactgctgtttattactgtactcgggaacttctcggcactgtggttgttcctgtggcttggaagatgcgtggatacttcgactattgggggcaactcactcttgttaccgtctcaagcgctagcaccaaaggacctagtgtttttcctcttgcccctcaagtgcaactccttgaaagtggaggtggccttgtccagccaggcggttcactgcgtttgagctgtgccgcatccggctttaccttttccagttacacaatgagttgggtccgtcaagcacccgggcaatgtttggaatggatgggaactatttcatctggtgggacttacacttactatcccgatagcgtcaagggacgttttaccataagccgggacaacgctaaaaattcactctatcttcagatgaacagtcttagggctgaggataccgctgtttattattgcgcccgagaagccattttcacctactgggggcgcggtacacttgtcaccgttagcagtgctagcaccaaaggacctagtgtttttcctcttgccccttcctcaaagtctacctctggggggacagccgctctgggctgcctggtcaaggattatttcccagagcctgtcactgtcagttggaactctggagccttgacttctggtgttcatacatttcctgctgtccttcaaagcagcggcttgtactcattgtcttctgttgtgacagtaccctcaagcagcctcggcactcagacatacatctgcaatgtcaaccacaaaccctcaaatacaaaggtagataaaaaagtcgaaccaaagtcttgtgacaaaactcacacgtgcccaccgtgcccagcacctgaactcctggggggaccgtcagtcttcctcttccccccaaaacccaaggacaccctcatgatctcccggacccctgaggtcacatgcgtggtggtggacgtgagccacgaagaccctgaggtcaagttcaactggtacgtggacggcgtggaggtgcataatgccaagacaaagccgcgggaggagcagtacaacagcacgtaccgtgtggtcagcgtcctcaccgtcctgcaccaggactggctgaatggcaaggagtacaagtgcaaggtctccaacaaagccctcccagcccccatcgagaaaaccatctccaaagccaaagggcagccccgagaaccacaggtgtacaccctgcccccatgccgggaggagatgaccaagaaccaggtcagcctgtggtgcctggtcaaaggcttctatcccagcgacatcgccgtggagtgggagagcaatgggcagccggagaacaactacaagaccacgcctcccgtgctggactccgacggctccttcttcctctacagcaagctcaccgtggacaagagcaggtggcagcaggggaacgtcttctcatgctccgtgatgcatgaggctctgcacaaccactacacgcagaagagcctctccctgtctccgggtaaa

SEQ ID NO: 549 - DNA, 1746 bp, synthetic construct
  misc_feature 1..1746: note = nucleotide sequence coding EPB11 LC
  source 1..1746: mol_type = other DNA
gacatacagatgactcagagccctggtacactgagtgtatctcctggggaacgcgccactctgtcttgccgagcctctcaaagcgttagttccaacctggcttggtatcagcaaaaacccggtcaagcacctcgcttgcttatctacggggcctccacacgggcaaccggcattcctgcacgctttagtggctctggtagcgggactgaattcactttgactatatcttccatgcagagtgaggatttcgccgtttattattgtcaacagtacaataactggcctccactcacttttggtggtggcaccaaagtggagataaagcgtacggtggcagctcccagcgtttttatctttcccccagacatacaactcacacaaagtccaagctctctttcccttagtccaggagaacgcgtaactctctcatgtaaagcctcccaggatatcaataactatctctcttggtaccaacaaaagcctgaccaagctcctaagctgcttatcaaacgcgccaatcggttggtagacggagttcccgacaggttcagtgggtcaggctcaggtacagattttaccttgaagatatcacgcgtggaagccgaagacgtaggggtatattattgtctgaaatatgacgagttcccctatacttttgggtgtggaactcgcctggaaataaaacgtacggtggcagctcccagcgtttttatctttcccccatccgacgagcagctcaagagtggcactgcctctgtagtttgtttgctgaataacttctatccacgtgaagcaaaagtacagtggaaggtcgataatgcccttcagagcggtaacagccaagaaagtgttaccgagcaagattccaaagattccacttacagtctgtccagcacattgacactgagtaaggctgattacgaaaaacacaaggtgtacgcatgcgaggtgacacaccaaggtctttcatctcctgtaactaagagctttaaccggggagaatgtggtggtgggggcagcgggggcggaggtagtggaggcggcggtagtgaaccaaagagtagtgacaaaactcacacgtgcccaccgtgcccagcacctgaactcctggggggaccgtcagtcttcctcttccccccaaaacccaaggacaccctcatgatctcccggacccctgaggtcacatgcgtggtggtggacgtgagccacgaagaccctgaggtcaagttcaactggtacgtggacggcgtggaggtgcataatgccaagacaaagccgcgggaggagcagtacaacagcacgtaccgtgtggtcagcgtcctcaccgtcctgcaccaggactggctgaatggcaaggagtacaagtgcaaggtctccaacaaagccctcccagcccccatcgagaaaaccatctccaaagccaaagggcagccccgagaaccacaggtgtacaccctgcccccatgccgggaggagatgaccaagaaccaggtcagcctgtggtgcctggtcaaaggcttctatcccagcgacatcgccgtggagtgggagagcaatgggcagccggagaacaactacaagaccacgcctcccgtgctggactccgacggctccttcttcctctacagcaagctcaccgtggacaagagcaggtggcagcaggggaacgtcttctcatgctccgtgatgcatgaggctctgcacaaccactacacgcagaagagcctctccctgtctccgggtaaa

SEQ ID NO: 550 - DNA, 1734 bp, synthetic construct
  misc_feature 1..1734: note = nucleotide sequence coding EPB12 HC
  source 1..1734: mol_type = other DNA
gaggtccagctggttgagtctggaggtggtgtagtcaggccaggaggttccctgcgtctgtcttgcgctgcctctgggttcactgtgtctgactacagtatgaactgggttagacaggctccagggaaaggtttggaatggatagggtttattcgcaataaagccaatgcctataccaccgaatacagcgcaagcgttaaaggcaggttcaccatcagtagggacgactctaagaataccctctacctgcagatgaatagcttgaagacagaggataccgctgtttattactgcactacctaccccaggtatcatgctatggacagttggggtcaaggaactatggtcaccgtctcctctgctagcaccaaaggacctagtgtttttcctcttgcccctcaagtgcaactccttgaaagtggaggtggccttgtccagccaggcggttcactgcgtttgagctgtgccgcatccggctttaccttttccagttacacaatgagttgggtccgtcaagcacccgggcaatgtttggaatggatgggaactatttcatctggtgggacttacacttactatcccgatagcgtcaagggacgttttaccataagccgggacaacgctaaaaattcactctatcttcagatgaacagtcttagggctgaggataccgctgtttattattgcgcccgagaagccattttcacctactgggggcgcggtacacttgtcaccgttagcagtgctagcaccaaaggacctagtgtttttcctcttgccccttcctcaaagtctacctctggggggacagccgctctgggctgcctggtcaaggattatttcccagagcctgtcactgtcagttggaactctggagccttgacttctggtgttcatacatttcctgctgtccttcaaagcagcggcttgtactcattgtcttctgttgtgacagtaccctcaagcagcctcggcactcagacatacatctgcaatgtcaaccacaaaccctcaaatacaaaggtagataaaaaagtcgaaccaaagtcttgtgacaaaactcacacgtgcccaccgtgcccagcacctgaactcctggggggaccgtcagtcttcctcttccccccaaaacccaaggacaccctcatgatctcccggacccctgaggtcacatgcgtggtggtggacgtgagccacgaagaccctgaggtcaagttcaactggtacgtggacggcgtggaggtgcataatgccaagacaaagccgcgggaggagcagtacaacagcacgtaccgtgtggtcagcgtcctcaccgtcctgcaccaggactggctgaatggcaaggagtacaagtgcaaggtctccaacaaagccctcccagcccccatcgagaaaaccatctccaaagccaaagggcagccccgagaaccacaggtgtacaccctgcccccatgccgggaggagatgaccaagaaccaggtcagcctgtggtgcctggtcaaaggcttctatcccagcgacatcgccgtggagtgggagagcaatgggcagccggagaacaactacaagaccacgcctcccgtgctggactccgacggctccttcttcctctacagcaagctcaccgtggacaagagcaggtggcagcaggggaacgtcttctcatgctccgtgatgcatgaggctctgcacaaccactacacgcagaagagcctctccctgtctccgggtaaa

SEQ ID NO: 551 - DNA, 1743 bp, synthetic construct
  misc_feature 1..1743: note = nucleotide sequence coding EPB12 LC
  source 1..1743: mol_type = other DNA
gccatacagctgactcaatcaccttcttctttgagcgcctctgtcggtgatcgcgttacaattacatgccgagcttctcagtctatctctaataacctccactggtatctccagaaacctggacagtcaccacagcttctgatatattacggctttcagtctataagtggagtcccaagtagattttccggtagtggatctggcaccgattttactcttactatctctagcctccaacctgaagatttcgcaacctattactgccagcaggccaattcctggcccttgaccttcggaggtgggactaagctggaaatcaaacgtacggtggcagctcccagcgtttttatctttcccccagacatacaactcacacaaagtccaagctctctttcccttagtccaggagaacgcgtaactctctcatgtaaagcctcccaggatatcaataactatctctcttggtaccaacaaaagcctgaccaagctcctaagctgcttatcaaacgcgccaatcggttggtagacggagttcccgacaggttcagtgggtcaggctcaggtacagattttaccttgaagatatcacgcgtggaagccgaagacgtaggggtatattattgtctgaaatatgacgagttcccctatacttttgggtgtggaactcgcctggaaataaaacgtacggtggcagctcccagcgtttttatctttcccccatccgacgagcagctcaagagtggcactgcctctgtagtttgtttgctgaataacttctatccacgtgaagcaaaagtacagtggaaggtcgataatgcccttcagagcggtaacagccaagaaagtgttaccgagcaagattccaaagattccacttacagtctgtccagcacattgacactgagtaaggctgattacgaaaaacacaaggtgtacgcatgcgaggtgacacaccaaggtctttcatctcctgtaactaagagctttaaccggggagaatgtggtggtgggggcagcgggggcggaggtagtggaggcggcggtagtgaaccaaagagtagtgacaaaactcacacgtgcccaccgtgcccagcacctgaactcctggggggaccgtcagtcttcctcttccccccaaaacccaaggacaccctcatgatctcccggacccctgaggtcacatgcgtggtggtggacgtgagccacgaagaccctgaggtcaagttcaactggtacgtggacggcgtggaggtgcataatgccaagacaaagccgcgggaggagcagtacaacagcacgtaccgtgtggtcagcgtcctcaccgtcctgcaccaggactggctgaatggcaaggagtacaagtgcaaggtctccaacaaagccctcccagcccccatcgagaaaaccatctccaaagccaaagggcagccccgagaaccacaggtgtacaccctgcccccatgccgggaggagatgaccaagaaccaggtcagcctgtggtgcctggtcaaaggcttctatcccagcgacatcgccgtggagtgggagagcaatgggcagccggagaacaactacaagaccacgcctcccgtgctggactccgacggctccttcttcctctacagcaagctcaccgtggacaagagcaggtggcagcaggggaacgtcttctcatgctccgtgatgcatgaggctctgcacaaccactacacgcagaagagcctctccctgtctccgggtaaa

SEQ ID NO: 552 - DNA, 387 bp, synthetic construct
  misc_feature 1..387: note = nucleotide sequence coding VH1 of EPB01
  source 1..387: mol_type = other DNA
gaggtgcaactgcttgagtcaggaggaggactggttcaacccggcgggagccttcgactctcatgtgcagcctctgggtttacatttagtcgttaccaaatgatgtgggtacgccaggcccccggaaaaggtttggagtgggtgagcagcatttctccttcaggaggagtgacactttacgcagacagtgttaagggtcggttcacaatcagtcgtgataattccaagaacactctctatctccaaatgaactcccttcgagctgaggacactgctgtttattactgtactcgggaacttctcggcactgtggttgttcctgtggcttggaagatgcgtggatacttcgactattgggggcaactcactcttgttaccgtctcaagc

SEQ ID NO: 553 - DNA, 384 bp, synthetic construct
  misc_feature 1..384: note = nucleotide sequence coding VH2 of EPB01
  source 1..384: mol_type = other DNA
gaggttcaactccttgaatccggaggaggacttgtccaaccaggcggcagccttaggctgtcctgcgctgcctcaggctttacattcagtcattacatgatggcctgggttagacaggcacccggcaaatgtctggaatgggtcagccgaataggaccatcaggaggtcccactcactatgccgattctgtaaaagggaggtttacaatttccagagacaattcaaagaataccctttacctccagatgaactcattgagagccgaggacacagccgtatattattgcgcaggttatgattccggttacgattacgttgcagtcgcaggcccagccgaatacttccaacattggggtcagggaaccctcgtgaccgtgtccagt

SEQ ID NO: 554 - DNA, 324 bp, synthetic construct
  misc_feature 1..324: note = nucleotide sequence coding VL1 of EPB01
  source 1..324: mol_type = other DNA
gacatacagatgactcagagccctggtacactgagtgtatctcctggggaacgcgccactctgtcttgccgagcctctcaaagcgttagttccaacctggcttggtatcagcaaaaacccggtcaagcacctcgcttgcttatctacggggcctccacacgggcaaccggcattcctgcacgctttagtggctctggtagcgggactgaattcactttgactatatcttccatgcagagtgaggatttcgccgtttattattgtcaacagtacaataactggcctccactcacttttggtggtggcaccaaagtggagataaag

SEQ ID NO: 555 - DNA, 321 bp, synthetic construct
  misc_feature 1..321: note = nucleotide sequence coding VL2 of EPB01
  source 1..321: mol_type = other DNA
gacatacagatgacacaaagtccaagtagcctttctgcatccgttggagaccgcgtaaccataacttgtcgagcatcacaaagcataagcacttggcttgcttggtatcagcagaagccaggcaaagcacccaagctgctgatttataaagcctctaatctccatacaggagttcccagccgtttctcaggcagcgggtctggaaccgaattctctctgaccatctctggcttgcaacctgatgactttgcaacatattactgtcaacaatataattcatatagtcgtactttcgggtgtggcactaaggtggaaatcaaa

SEQ ID NO: 556 - DNA, 360 bp, synthetic construct
  misc_feature 1..360: note = nucleotide sequence coding VH1 of EPB02
  source 1..360: mol_type = other DNA
gaggtccagctggttgagtctggaggtggtgtagtcaggccaggaggttccctgcgtctgtcttgcgctgcctctgggttcactgtgtctgactacagtatgaactgggttagacaggctccagggaaaggtttggaatggatagggtttattcgcaataaagccaatgcctataccaccgaatacagcgcaagcgttaaaggcaggttcaccatcagtagggacgactctaagaataccctctacctgcagatgaatagcttgaagacagaggataccgctgtttattactgcactacctaccccaggtatcatgctatggacagttggggtcaaggaactatggtcaccgtctcctct

SEQ ID NO: 557 - DNA, 321 bp, synthetic construct
  misc_feature 1..321: note = nucleotide sequence coding VL1 of EPB02
  source 1..321: mol_type = other DNA
gccatacagctgactcaatcaccttcttctttgagcgcctctgtcggtgatcgcgttacaattacatgccgagcttctcagtctatctctaataacctccactggtatctccagaaacctggacagtcaccacagcttctgatatattacggctttcagtctataagtggagtcccaagtagattttccggtagtggatctggcaccgattttactcttactatctctagcctccaacctgaagatttcgcaacctattactgccagcaggccaattcctggcccttgaccttcggaggtgggactaagctggaaatcaaa

SEQ ID NO: 558 - DNA, 345 bp, synthetic construct
  misc_feature 1..345: note = nucleotide sequence coding VH1 of EPB03
  source 1..345: mol_type = other DNA
caagtgcaactccttgaaagtggaggtggccttgtccagccaggcggttcactgcgtttgagctgtgccgcatccggctttaccttttccagttacacaatgagttgggtccgtcaagcacccgggcaagctttggaatggatgggaactatttcatctggtgggacttacacttactatcccgatagcgtcaagggacgttttaccataagccgggacaacgctaaaaattcactctatcttcagatgaacagtcttagggctgaggataccgctgtttattattgcgcccgagaagccattttcacctactgggggcgcggtacacttgtcaccgttagcagt

SEQ ID NO: 559 - DNA, 321 bp, synthetic construct
  misc_feature 1..321: note = nucleotide sequence coding VL1 of EPB03
  source 1..321: mol_type = other DNA
gacatacaactcacacaaagtccaagctctctttcccttagtccaggagaacgcgtaactctctcatgtaaagcctcccaggatatcaataactatctctcttggtaccaacaaaagcctgaccaagctcctaagctgcttatcaaacgcgccaatcggttggtagacggagttcccgacaggttcagtgggtcaggctcaggtacagattttaccttgaagatatcacgcgtggaagccgaagacgtaggggtatattattgtctgaaatatgacgagttcccctatacttttgggcaaggaactcgcctggaaataaaa

SEQ ID NO: 560 - DNA, 387 bp, synthetic construct
  misc_feature 1..387: note = nucleotide sequence coding VH2 of EPB04
  source 1..387: mol_type = other DNA
gaggtgcaactgcttgagtcaggaggaggactggttcaacccggcgggagccttcgactctcatgtgcagcctctgggtttacatttagtcgttaccaaatgatgtgggtacgccaggcccccggaaaatgtttggagtgggtgagcagcatttctccttcaggaggagtgacactttacgcagacagtgttaagggtcggttcacaatcagtcgtgataattccaagaacactctctatctccaaatgaactcccttcgagctgaggacactgctgtttattactgtactcgggaacttctcggcactgtggttgttcctgtggcttggaagatgcgtggatacttcgactattgggggcaactcactcttgttaccgtctcaagc

SEQ ID NO: 561 - DNA, 324 bp, synthetic construct
  misc_feature 1..324: note = nucleotide sequence coding VL2 of EPB08
  source 1..324: mol_type = other DNA
gacatacagatgactcagagccctggtacactgagtgtatctcctggggaacgcgccactctgtcttgccgagcctctcaaagcgttagttccaacctggcttggtatcagcaaaaacccggtcaagcacctcgcttgcttatctacggggcctccacacgggcaaccggcattcctgcacgctttagtggctctggtagcgggactgaattcactttgactatatcttccatgcagagtgaggatttcgccgtttattattgtcaacagtacaataactggcctccactcacttttggttgtggcaccaaagtggagataaag

SEQ ID NO: 562 - DNA, 360 bp, synthetic construct
  misc_feature 1..360: note = nucleotide sequence coding VH2 of EPB09
  source 1..360: mol_type = other DNA
gaggtccagctggttgagtctggaggtggtgtagtcaggccaggaggttccctgcgtctgtcttgcgctgcctctgggttcactgtgtctgactacagtatgaactgggttagacaggctccagggaaatgtttggaatggatagggtttattcgcaataaagccaatgcctataccaccgaatacagcgcaagcgttaaaggcaggttcaccatcagtagggacgactctaagaataccctctacctgcagatgaatagcttgaagacagaggataccgctgtttattactgcactacctaccccaggtatcatgctatggacagttggggtcaaggaactatggtcaccgtctcctct

SEQ ID NO: 563 - DNA, 321 bp, synthetic construct
  misc_feature 1..321: note = nucleotide sequence coding VL2 of EPB09
  source 1..321: mol_type = other DNA
gccatacagctgactcaatcaccttcttctttgagcgcctctgtcggtgatcgcgttacaattacatgccgagcttctcagtctatctctaataacctccactggtatctccagaaacctggacagtcaccacagcttctgatatattacggctttcagtctataagtggagtcccaagtagattttccggtagtggatctggcaccgattttactcttactatctctagcctccaacctgaagatttcgcaacctattactgccagcaggccaattcctggcccttgaccttcggatgtgggactaagctggaaatcaaa

SEQ ID NO: 564 - DNA, 345 bp, synthetic construct
  misc_feature 1..345: note = nucleotide sequence coding VH2 of EPB11
  source 1..345: mol_type = other DNA
caagtgcaactccttgaaagtggaggtggccttgtccagccaggcggttcactgcgtttgagctgtgccgcatccggctttaccttttccagttacacaatgagttgggtccgtcaagcacccgggcaatgtttggaatggatgggaactatttcatctggtgggacttacacttactatcccgatagcgtcaagggacgttttaccataagccgggacaacgctaaaaattcactctatcttcagatgaacagtcttagggctgaggataccgctgtttattattgcgcccgagaagccattttcacctactgggggcgcggtacacttgtcaccgttagcagt

SEQ ID NO: 565 - DNA, 321 bp, synthetic construct
  misc_feature 1..321: note = nucleotide sequence coding VL2 of EPB11
  source 1..321: mol_type = other DNA
gacatacaactcacacaaagtccaagctctctttcccttagtccaggagaacgcgtaactctctcatgtaaagcctcccaggatatcaataactatctctcttggtaccaacaaaagcctgaccaagctcctaagctgcttatcaaacgcgccaatcggttggtagacggagttcccgacaggttcagtgggtcaggctcaggtacagattttaccttgaagatatcacgcgtggaagccgaagacgtaggggtatattattgtctgaaatatgacgagttcccctatacttttgggtgtggaactcgcctggaaataaaa

SEQ ID NO: 566 - DNA, 3765 bp, synthetic construct
  source 1..3765: mol_type = other DNA
  misc_feature 1..3765: note = nucleotide sequence coding human HER2
atggagctggcggccttgtgccgctgggggctcctcctcgccctcttgccccccggagccgcgagcacccaagtgtgcaccggcacagacatgaagctgcggctccctgccagtcccgagacccacctggacatgctccgccacctctaccagggctgccaggtggtgcagggaaacctggaactcacctacctgcccaccaatgccagcctgtccttcctgcaggatatccaggaggtgcagggctacgtgctcatcgctcacaaccaagtgaggcaggtcccactgcagaggctgcggattgtgcgaggcacccagctctttgaggacaactatgccctggccgtgctagacaatggagacccgctgaacaataccacccctgtcacaggggcctccccaggaggcctgcgggagctgcagcttcgaagcctcacagagatcttgaaaggaggggtcttgatccagcggaacccccagctctgctaccaggacacgattttgtggaaggacatcttccacaagaacaaccagctggctctcacactgatagacaccaaccgctctcgggcctgccacccctgttctccgatgtgtaagggctcccgctgctggggagagagttctgaggattgtcagagcctgacgcgcactgtctgtgccggtggctgtgcccgctgcaaggggccactgcccactgactgctgccatgagcagtgtgctgccggctgcacgggccccaagcactctgactgcctggcctgcctccacttcaaccacagtggcatctgtgagctgcactgcccagccctggtcacctacaacacagacacgtttgagtccatgcccaatcccgagggccggtatacattcggcgccagctgtgtgactgcctgtccctacaactacctttctacggacgtgggatcctgcaccctcgtctgccccctgcacaaccaagaggtgacagcagaggatggaacacagcggtgtgagaagtgcagcaagccctgtgcccgagtgtgctatggtctgggcatggagcacttgcgagaggtgagggcagttaccagtgccaatatccaggagtttgctggctgcaagaagatctttgggagcctggcatttctgccggagagctttgatggggacccagcctccaacactgccccgctccagccagagcagctccaagtgtttgagactctggaagagatcacaggttacctatacatctcagcatggccggacagcctgcctgacctcagcgtcttccagaacctgcaagtaatccggggacgaattctgcacaatggcgcctactcgctgaccctgcaagggctgggcatcagctggctggggctgcgctcactgagggaactgggcagtggactggccctcatccaccataacacccacctctgcttcgtgcacacggtgccctgggaccagctctttcggaacccgcaccaagctctgctccacactgccaaccggccagaggacgagtgtgtgggcgagggcctggcctgccaccagctgtgcgcccgagggcactgctggggtccagggcccacccagtgtgtcaactgcagccagttccttcggggccaggagtgcgtggaggaatgccgagtactgcaggggctccccagggagtatgtgaatgccaggcactgtttgccgtgccaccctgagtgtcagccccagaatggctcagtgacctgttttggaccggaggctgaccagtgtgtggcctgtgcccactataaggaccctcccttctgcgtggcccgctgccccagcggtgtgaaacctgacctctcctacatgcccatctggaagtttccagatgaggagggcgcatgccagccttgccccatcaactgcacccactcctgtgtggacctggatgacaagggctgccccgccgagcagagagccagccctctgacgtccatcatctctgcggtggttggcattctgctggtcgtggtcttgggggtggtctttgggatcctcatcaagcgacggcagcagaagatccggaagtacacgatgcggagactgctgcaggaaacggagctggtggagccgctgacacctagcggagcgatgcccaaccaggcgcagatgcggatcctgaaagagacggagctgaggaaggtgaaggtgcttggatctggcgcttttggcacagtctacaagggcatctggatccctgatggggagaatgtgaaaattccagtggccatcaaagtgttgagggaaaacacatcccccaaagccaacaaagaaatcttagacgaagcatacgtgatggctggtgtgggctccccatatgtctcccgccttctgggcatctgcctgacatccacggtgcagctggtgacacagcttatgccctatggctgcctcttagaccatgtccgggaaaaccgcggacgcctgggctcccaggacctgctgaactggtgtatgcagattgccaaggggatgagctacctggaggatgtgcggctcgtacacagggacttggccgctcggaacgtgctggtcaagagtcccaaccatgtcaaaattacagacttcgggctggctcggctgctggacattgacgagacagagtaccatgcagatgggggcaaggtgcccatcaagtggatggcgctggagtccattctccgccggcggttcacccaccagagtgatgtgtggagttatggtgtgactgtgtgggagctgatgacttttggggccaaaccttacgatgggatcccagcccgggagatccctgacctgctggaaaagggggagcggctgccccagccccccatctgcaccattgatgtctacatgatcatggtcaaatgttggatgattgactctgaatgtcggccaagattccgggagttggtgtctgaattctcccgcatggccagggacccccagcgctttgtggtcatccagaatgaggacttgggcccagccagtcccttggacagcaccttctaccgctcactgctggaggacgatgacatgggggacctggtggatgctgaggagtatctggtaccccagcagggcttcttctgtccagaccctgccccgggcgctgggggcatggtccaccacaggcaccgcagctcatctaccaggagtggcggtggggacctgacactagggctggagccctctgaagaggaggcccccaggtctccactggcaccctccgaaggggctggctccgatgtatttgatggtgacctgggaatgggggcagccaaggggctgcaaagcctccccacacatgaccccagccctctacagcggtacagtgaggaccccacagtacccctgccctctgagactgatggctacgttgcccccctgacctgcagcccccagcctgaatatgtgaaccagccagatgttcggccccagcccccttcgccccgagagggccctctgcctgctgcccgacctgctggtgccactctggaaaggcccaagactctctccccagggaagaatggggtcgtcaaagacgtttttgcctttgggggtgccgtggagaaccccgagtacttgacaccccagggaggagctgcccctcagccccaccctcctcctgccttcagcccagccttcgacaacctctattactgggaccaggacccaccagagcggggggctccacccagcaccttcaaagggacacctacggcagagaacccagagtacctgggtctggacgtgccagtg

SEQ ID NO: 567 - protein, 1255 aa, synthetic construct [sequence omitted]

SEQ ID NO: 568 - protein, 449 aa, synthetic construct
  REGION 1..449: note = MEM01 HC
EVQLVESGGGLVQPGGSLRLSCAASGYTFTSYWLHWVRQAPGKCLEWVGMIDPSNSDTRFNPNFKDRFTISADTSKNTAYLQMNSLRAEDTAVYYCATYRSYVTPLDYWGQGTLVTVSSASTKGPSVFPLAPSSKSTSGGTAALGCLVKDYFPEPVTVSWNSGALTSGVHTFPAVLQSSGLYSLSSVVTVPSSSLGTQTYICNVNHKPSNTKVDKKVEPKSCDKTHTCPPCPAPELLGGPSVFLFPPKPKDTLMISRTPEVTCVVVDVSHEDPEVKFNWYVDGVEVHNAKTKPREEQYNSTYRVVSVLTVLHQDWLNGKEYKCKVSNKALPAPIEKTISKAKGQPREPQVYTLPPCREEMTKNQVSLWCLVKGFYPSDIAVEWESNGQPENNYKTTPPVLDSDGSFFLYSKLTVDKSRWQQGNVFSCSVMHEALHNHYTQKSLSLSPGK

SEQ ID NO: 569 - protein, 467 aa, synthetic construct
  REGION 1..467: note = MEM01 LC
DIQMTQSPSSLSASVGDRVTITCKSSQSLLYTSSQKNYLAWYQQKPGKAPKLLIYWASTRESGVPSRFSGSGSGTDFTLTISSLQPEDFATYYCQQYYAYPWTFGCGTKVEIKRTVAAPSVFIFPPSDEQLKSGTASVVCLLNNFYPREAKVQWKVDNALQSGNSQESVTEQDSKDSTYSLSSTLTLSKADYEKHKVYACEVTHQGLSSPVTKSFNRGECGGGGSGGGGSGGGGSEPKSSDKTHTCPPCPAPELLGGPSVFLFPPKPKDTLMISRTPEVTCVVVDVSHEDPEVKFNWYVDGVEVHNAKTKPREEQYNSTYRVVSVLTVLHQDWLNGKEYKCKVSNKALPAPIEKTISKAKGQPREPQVYTLPPCREEMTKNQVSLWCLVKGFYPSDIAVEWESNGQPENNYKTTPPVLDSDGSFFLYSKLTVDKSRWQQGNVFSCSVMHEALHNHYTQKSLSLSPGK

SEQ ID NO: 570 - protein, 447 aa, synthetic construct
  REGION 1..447: note = MEM06 HC
QVQLVQSGAEVKKPGASVKVSCKASGYTFTSYGFSWVRQAPGQCLEWMGWISASNGNTYYAQKLQGRVTMTTDTSTSTAYMELRSLRSDDTAVYYCARVYADYADYWGQGTLVTVSSASTKGPSVFPLAPSSKSTSGGTAALGCLVKDYFPEPVTVSWNSGALTSGVHTFPAVLQSSGLYSLSSVVTVPSSSLGTQTYICNVNHKPSNTKVDKKVEPKSCDKTHTCPPCPAPELLGGPSVFLFPPKPKDTLMISRTPEVTCVVVDVSHEDPEVKFNWYVDGVEVHNAKTKPREEQYNSTYRVVSVLTVLHQDWLNGKEYKCKVSNKALPAPIEKTISKAKGQPREPQVYTLPPCREEMTKNQVSLWCLVKGFYPSDIAVEWESNGQPENNYKTTPPVLDSDGSFFLYSKLTVDKSRWQQGNVFSCSVMHEALHNHYTQKSLSLSPGK

SEQ ID NO: 571 - protein, 461 aa, synthetic construct
DIQMTQSPSSVSASVGDRVTITCRASQGINTWLAWYQQKPGKAPKLLIYAASSLKSGVPSRFSGSGSGTDFTLTISSLQPEDFATYYCQQANSFPLTFGCGTKVEIKRTVAAPSVFIFPPSDEQLKSGTASVVCLLNNFYPREAKVQWKVDNALQSGNSQESVTEQDSKDSTYSLSSTLTLSKADYEKHKVYACEVTHQGLSSPVTKSFNRGECGGGGSGGGGSGGGGSEPKSSDKTHTCPPCPAPELLGGPSVFLFPPKPKDTLMISRTPEVTCVVVDVSHEDPEVKFNWYVDGVEVHNAKTKPREEQYNSTYRVVSVLTVLHQDWLNGKEYKCKVSNKALPAPIEKTISKAKGQPREPQVYTLPPCREEMTKNQVSLWCLVKGFYPSDIAVEWESNGQPENNYKTTPPVLDSDGSFFLYSKLTVDKSRWQQGNVFSCSVMHEALHNHYTQKSLSLSPGK

SEQ ID NO: 572 - DNA, 1347 bp, synthetic construct
  source 1..1347: mol_type = other DNA
  misc_feature 1..1347: note = nucleotide sequence coding HC of MEM01
gaagtccaattggtcgagagtggaggcgggttggtacagccaggaggttcacttaggttgtcctgcgccgccagtggttacactttcacatcttattggctgcactgggtgcgccaagctcctgggaagtgtctcgaatgggtgggtatgatcgatccatctaattccgacacacggtttaacccaaattttaaggatagatttacaattagtgctgacacttcaaaaaacacagcatacctccagatgaacagcctgcgtgctgaggatactgctgtctactactgtgcaacttaccgctcctatgtcacacctttggattattggggccaggggactctggtgaccgtgagttctgctagcaccaaaggacctagtgtttttcctcttgccccttcctcaaagtctacctctggggggacagccgctctgggctgcctggtcaaggattatttcccagagcctgtcactgtcagttggaactctggagccttgacttctggtgttcatacatttcctgctgtccttcaaagcagcggcttgtactcattgtcttctgttgtgacagtaccctcaagcagcctcggcactcagacatacatctgcaatgtcaaccacaaaccctcaaatacaaaggtagataaaaaagtcgaaccaaagtcttgtgacaaaactcacacgtgcccaccgtgcccagcacctgaactcctggggggaccgtcagtcttcctcttccccccaaaacccaaggacaccctcatgatctcccggacccctgaggtcacatgcgtggtggtggacgtgagccacgaagaccctgaggtcaagttcaactggtacgtggacggcgtggaggtgcataatgccaagacaaagccgcgggaggagcagtacaacagcacgtaccgtgtggtcagcgtcctcaccgtcctgcaccaggactggctgaatggcaaggagtacaagtgcaaggtctccaacaaagccctcccagcccccatcgagaaaaccatctccaaagccaaagggcagccccgagaaccacaggtgtacaccctgcccccatgccgggaggagatgaccaagaaccaggtcagcctgtggtgcctggtcaaaggcttctatcccagcgacatcgccgtggagtgggagagcaatgggcagccggagaacaactacaagaccacgcctcccgtgctggactccgacggctccttcttcctctacagcaagctcaccgtggacaagagcaggtggcagcaggggaacgtcttctcatgctccgtgatgcatgaggctctgcacaaccactacacgcagaagagcctctccctgtctccgggtaaa

SEQ ID NO: 573 - DNA, 1401 bp, synthetic construct
  source 1..1401: mol_type = other DNA
  misc_feature 1..1401: note = nucleotide sequence coding LC of MEM01
gatatacagatgacacaaagtccctcatcactttctgcctccgttggagatcgtgtgaccattacctgtaagagttcccaatcactgctttatacctcttcacaaaaaaattacctcgcttggtaccagcagaagccaggtaaagcacctaagctgttgatctattgggcctccactagagagtcaggcgtgcccagccgtttctccggttcagggagtgggacagactttaccttgaccatttcttctttgcaacctgaagacttcgccacatactattgtcagcaatattacgcatatccatggacctttgggtgtggaaccaaagtcgaaataaaacgtacggtggcagctcccagcgtttttatctttcccccatccgacgagcagctcaagagtggcactgcctctgtagtttgtttgctgaataacttctatccacgtgaagcaaaagtacagtggaaggtcgataatgcccttcagagcggtaacagccaagaaagtgttaccgagcaagattccaaagattccacttacagtctgtccagcacattgacactgagtaaggctgattacgaaaaacacaaggtgtacgcatgcgaggtgacacaccaaggtctttcatctcctgtaactaagagctttaaccggggagaatgtggtggtgggggcagcgggggcggaggtagtggaggcggcggtagtgaaccaaagagtagtgacaaaactcacacgtgcccaccgtgcccagcacctgaactcctggggggaccgtcagtcttcctcttccccccaaaacccaaggacaccctcatgatctcccggacccctgaggtcacatgcgtggtggtggacgtgagccacgaagaccctgaggtcaagttcaactggtacgtggacggcgtggaggtgcataatgccaagacaaagccgcgggaggagcagtacaacagcacgtaccgtgtggtcagcgtcctcaccgtcctgcaccaggactggctgaatggcaaggagtacaagtgcaaggtctccaacaaagccctcccagcccccatcgagaaaaccatctccaaagccaaagggcagccccgagaaccacaggtgtacaccctgcccccatgccgggaggagatgaccaagaaccaggtcagcctgtggtgcctggtcaaaggcttctatcccagcgacatcgccgtggagtgggagagcaatgggcagccggagaacaactacaagaccacgcctcccgtgctggactccgacggctccttcttcctctacagcaagctcaccgtggacaagagcaggtggcagcaggggaacgtcttctcatgctccgtgatgcatgaggctctgcacaaccactacacgcagaagagcctctccctgtctccgggtaaa

SEQ ID NO: 574 - DNA, 1341 bp, synthetic construct
  source 1..1341: mol_type = other DNA
  misc_feature 1..1341: note = nucleotide sequence coding HC of MEM06
caagtgcagcttgttcaatcaggggccgaggttaagaaaccaggtgcttccgtcaaggtctcctgcaaggcttccggctacacttttaccagttatgggttcagttgggttagacaggccccagggcagtgtctcgaatggatgggatggatttccgcatctaacgggaatacttactatgcccagaaacttcaaggtagggttaccatgactaccgatacttccactagtacagcctacatggaactcagatcactccgttcagatgacaccgcagtatattactgtgcaagggtatatgctgattatgccgattattgggggcaaggaacacttgtcacagtatccagcgctagcaccaaaggacctagtgtttttcctcttgccccttcctcaaagtctacctctggggggacagccgctctgggctgcctggtcaaggattatttcccagagcctgtcactgtcagttggaactctggagccttgacttctggtgttcatacatttcctgctgtccttcaaagcagcggcttgtactcattgtcttctgttgtgacagtaccctcaagcagcctcggcactcagacatacatctgcaatgtcaaccacaaaccctcaaatacaaaggtagataaaaaagtcgaaccaaagtcttgtgacaaaactcacacgtgcccaccgtgcccagcacctgaactcctggggggaccgtcagtcttcctcttccccccaaaacccaaggacaccctcatgatctcccggacccctgaggtcacatgcgtggtggtggacgtgagccacgaagaccctgaggtcaagttcaactggtacgtggacggcgtggaggtgcataatgccaagacaaagccgcgggaggagcagtacaacagcacgtaccgtgtggtcagcgtcctcaccgtcctgcaccaggactggctgaatggcaaggagtacaagtgcaaggtctccaacaaagccctcccagcccccatcgagaaaaccatctccaaagccaaagggcagccccgagaaccacaggtgtacaccctgcccccatgccgggaggagatgaccaagaaccaggtcagcctgtggtgcctggtcaaaggcttctatcccagcgacatcgccgtggagtgggagagcaatgggcagccggagaacaactacaagaccacgcctcccgtgctggactccgacggctccttcttcctctacagcaagctcaccgtggacaagagcaggtggcagcaggggaacgtcttctcatgctccgtgatgcatgaggctctgcacaaccactacacgcagaagagcctctccctgtctccgggtaaa

SEQ ID NO: 575 - DNA, 1383 bp, synthetic construct
  source 1..1383: mol_type = other DNA
  misc_feature 1..1383: note = nucleotide sequence coding LC of MEM06
gatatccaaatgacacagtcaccctcaagtgttagcgcaagtgtcggggacagggtgaccatcacatgcagagcttcccagggtatcaatacatggctggcatggtatcaacagaaacccggaaaagcaccaaaattgcttatttatgcagcttctagcttgaagagtggggttccctctcgtttctctggttcaggaagcggtactgactttaccttgaccatcagtagcttgcagcccgaagatttcgctacatattattgccaacaggccaactcttttcccctgacattcggttgtggcactaaagtggaaattaagcgtacggtggcagctcccagcgtttttatctttcccccatccgacgagcagctcaagagtggcactgcctctgtagtttgtttgctgaataacttctatccacgtgaagcaaaagtacagtggaaggtcgataatgcccttcagagcggtaacagccaagaaagtgttaccgagcaagattccaaagattccacttacagtctgtccagcacattgacactgagtaaggctgattacgaaaaacacaaggtgtacgcatgcgaggtgacacaccaaggtctttcatctcctgtaactaagagctttaaccggggagaatgtggtggtgggggcagcgggggcggaggtagtggaggcggcggtagtgaaccaaagagtagtgacaaaactcacacgtgcccaccgtgcccagcacctgaactcctggggggaccgtcagtcttcctcttccccccaaaacccaaggacaccctcatgatctcccggacccctgaggtcacatgcgtggtggtggacgtgagccacgaagaccctgaggtcaagttcaactggtacgtggacggcgtggaggtgcataatgccaagacaaagccgcgggaggagcagtacaacagcacgtaccgtgtggtcagcgtcctcaccgtcctgcaccaggactggctgaatggcaaggagtacaagtgcaaggtctccaacaaagccctcccagcccccatcgagaaaaccatctccaaagccaaagggcagccccgagaaccacaggtgtacaccctgcccccatgccgggaggagatgaccaagaaccaggtcagcctgtggtgcctggtcaaaggcttctatcccagcgacatcgccgtggagtgggagagcaatgggcagccggagaacaactacaagaccacgcctcccgtgctggactccgacggctccttcttcctctacagcaagctcaccgtggacaagagcaggtggcagcaggggaacgtcttctcatgctccgtgatgcatgaggctctgcacaaccactacacgcagaagagcctctccctgtctccgggtaaa

SEQ ID NO: 576 - protein, 119 aa, synthetic construct
  REGION 1..119: note = MEM01-VH
EVQLVESGGGLVQPGGSLRLSCAASGYTFTSYWLHWVRQAPGKCLEWVGMIDPSNSDTRFNPNFKDRFTISADTSKNTAYLQMNSLRAEDTAVYYCATYRSYVTPLDYWGQGTLVTVSS

SEQ ID NO: 577 - protein, 113 aa, synthetic construct
  REGION 1..113: note = MEM01-VL
DIQMTQSPSSLSASVGDRVTITCKSSQSLLYTSSQKNYLAWYQQKPGKAPKLLIYWASTRESGVPSRFSGSGSGTDFTLTISSLQPEDFATYYCQQYYAYPWTFGCGTKVEIK

SEQ ID NO: 578 - protein, 117 aa, synthetic construct
  REGION 1..117: note = MEM06-VH
QVQLVQSGAEVKKPGASVKVSCKASGYTFTSYGFSWVRQAPGQCLEWMGWISASNGNTYYAQKLQGRVTMTTDTSTSTAYMELRSLRSDDTAVYYCARVYADYADYWGQGTLVTVSS

SEQ ID NO: 579 - protein, 107 aa, synthetic construct
  REGION 1..107: note = MEM06-VL
DIQMTQSPSSVSASVGDRVTITCRASQGINTWLAWYQQKPGKAPKLLIYAASSLKSGVPSRFSGSGSGTDFTLTISSLQPEDFATYYCQQANSFPLTFGCGTKVEIK

SEQ ID NO: 580 - DNA, 357 bp, synthetic construct
  source 1..357: mol_type = other DNA
  misc_feature 1..357: note = nucleotide sequence coding VH of MEM01
gaagtccaattggtcgagagtggaggcgggttggtacagccaggaggttcacttaggttgtcctgcgccgccagtggttacactttcacatcttattggctgcactgggtgcgccaagctcctgggaagtgtctcgaatgggtgggtatgatcgatccatctaattccgacacacggtttaacccaaattttaaggatagatttacaattagtgctgacacttcaaaaaacacagcatacctccagatgaacagcctgcgtgctgaggatactgctgtctactactgtgcaacttaccgctcctatgtcacacctttggattattggggccaggggactctggtgaccgtgagttct

SEQ ID NO: 581 - DNA, 339 bp, synthetic construct
  source 1..339: mol_type = other DNA
  misc_feature 1..339: note = nucleotide sequence coding VL of MEM01
gatatacagatgacacaaagtccctcatcactttctgcctccgttggagatcgtgtgaccattacctgtaagagttcccaatcactgctttatacctcttcacaaaaaaattacctcgcttggtaccagcagaagccaggtaaagcacctaagctgttgatctattgggcctccactagagagtcaggcgtgcccagccgtttctccggttcagggagtgggacagactttaccttgaccatttcttctttgcaacctgaagacttcgccacatactattgtcagcaatattacgcatatccatggacctttgggtgtggaaccaaagtcgaaataaaa

SEQ ID NO: 582 - DNA, 351 bp, synthetic construct
  source 1..351: mol_type = other DNA
  misc_feature 1..351: note = nucleotide sequence coding VH of MEM06
caagtgcagcttgttcaatcaggggccgaggttaagaaaccaggtgcttccgtcaaggtctcctgcaaggcttccggctacacttttaccagttatgggttcagttgggttagacaggccccagggcagtgtctcgaatggatgggatggatttccgcatctaacgggaatacttactatgcccagaaacttcaaggtagggttaccatgactaccgatacttccactagtacagcctacatggaactcagatcactccgttcagatgacaccgcagtatattactgtgcaagggtatatgctgattatgccgattattgggggcaaggaacacttgtcacagtatccagc

SEQ ID NO: 583 - DNA, 321 bp, synthetic construct
  source 1..321: mol_type = other DNA
  misc_feature 1..321: note = nucleotide sequence coding VL of MEM06
gatatccaaatgacacagtcaccctcaagtgttagcgcaagtgtcggggacagggtgaccatcacatgcagagcttcccagggtatcaatacatggctggcatggtatcaacagaaacccggaaaagcaccaaaattgcttatttatgcagcttctagcttgaagagtggggttccctctcgtttctctggttcaggaagcggtactgactttaccttgaccatcagtagcttgcagcccgaagatttcgctacatattattgccaacaggccaactcttttcccctgacattcggttgtggcactaaagtggaaattaag

SEQ ID NO: 584 - protein, 5 aa, synthetic construct
  REGION 1..5: note = VH-CDR1 of MEM06
SYGFS

SEQ ID NO: 585 - protein, 17 aa, synthetic construct
  REGION 1..17: note = VH-CDR2 of MEM06
WISASNGNTYYAQKLQG

SEQ ID NO: 586 - protein, 8 aa, synthetic construct
  REGION 1..8: note = VH-CDR3 of MEM06
VYADYADY

SEQ ID NO: 587 - protein, 9 aa, synthetic construct
  REGION 1..9: note = VL-CDR1 of MEM06
QQANSFPLT

SEQ ID NO: 588 - protein, 7 aa, synthetic construct
  REGION 1..7: note = VL-CDR2 of MEM06
AASSLKS

SEQ ID NO: 589 - protein, 9 aa, synthetic construct
  REGION 1..9: note = VL-CDR3 of MEM06
QQANSFPLT

SEQ ID NO: 590 - protein, 449 aa, synthetic construct
  REGION 1..449: note = EGM01 HC
QVQLKQSGPGLVQPSQSLSITCTVSGFSLTNYGVHWVRQSPGKCLEWLGVIWSGGNTDYNTPFTSRLSINKDNSKSQVFFKMNSLQSNDTAIYYCARALTYYDYEFAYWGQGTLVTVSAASTKGPSVFPLAPSSKSTSGGTAALGCLVKDYFPEPVTVSWNSGALTSGVHTFPAVLQSSGLYSLSSVVTVPSSSLGTQTYICNVNHKPSNTKVDKKVEPKSCDKTHTCPPCPAPELLGGPSVFLFPPKPKDTLMISRTPEVTCVVVDVSHEDPEVKFNWYVDGVEVHNAKTKPREEQYNSTYRVVSVLTVLHQDWLNGKEYKCKVSNKALPAPIEKTISKAKGQPREPQVYTLPPCREEMTKNQVSLWCLVKGFYPSDIAVEWESNGQPENNYKTTPPVLDSDGSFFLYSKLTVDKSRWQQGNVFSCSVMHEALHNHYTQKSLSLSPGK

SEQ ID NO: 591 - protein, 461 aa, synthetic construct
  REGION 1..461: note = EGM01 LC
DILLTQSPVILSVSPGERVSFSCRASQSIGTNIHWYQQRTNGSPRLLIKYASESISGIPSRFSGSGSGTDFTLSINSVESEDIADYYCQQNNNWPTTFGCGTKLELKRTVAAPSVFIFPPSDEQLKSGTASVVCLLNNFYPREAKVQWKVDNALQSGNSQESVTEQDSKDSTYSLSSTLTLSKADYEKHKVYACEVTHQGLSSPVTKSFNRGECGGGGSGGGGSGGGGSEPKSSDKTHTCPPCPAPELLGGPSVFLFPPKPKDTLMISRTPEVTCVVVDVSHEDPEVKFNWYVDGVEVHNAKTKPREEQYNSTYRVVSVLTVLHQDWLNGKEYKCKVSNKALPAPIEKTISKAKGQPREPQVYTLPPCREEMTKNQVSLWCLVKGFYPSDIAVEWESNGQPENNYKTTPPVLDSDGSFFLYSKLTVDKSRWQQGNVFSCSVMHEALHNHYTQKSLSLSPGK

SEQ ID NO: 592 - protein, 451 aa, synthetic construct
  REGION 1..451: note = EGM02 HC
QVQLQESGPGLVKPSQTLSLTCTVSGGSISSGDYYWSWIRQPPGKCLEWIGYIYYSGSTDYNPSLKSRVTMSVDTSKNQFSLKVNSVTAADTAVYYCARVSIFGVGTFDYWGQGTLVTVSSASTKGPSVFPLAPSSKSTSGGTAALGCLVKDYFPEPVTVSWNSGALTSGVHTFPAVLQSSGLYSLSSVVTVPSSSLGTQTYICNVNHKPSNTKVDKKVEPKSCDKTHTCPPCPAPELLGGPSVFLFPPKPKDTLMISRTPEVTCVVVDVSHEDPEVKFNWYVDGVEVHNAKTKPREEQYNSTYRVVSVLTVLHQDWLNGKEYKCKVSNKALPAPIEKTISKAKGQPREPQVYTLPPCREEMTKNQVSLWCLVKGFYPSDIAVEWESNGQPENNYKTTPPVLDSDGSFFLYSKLTVDKSRWQQGNVFSCSVMHEALHNHYTQKSLSLSPGK

SEQ ID NO: 593 - protein, 461 aa, synthetic construct
  REGION 1..461: note = EGM02 LC
EIVMTQSPATLSLSPGERATLSCRASQSVSSYLAWYQQKPGQAPRLLIYDASNRATGIPARFSGSGSGTDFTLTISSLEPEDFAVYYCHQYGSTPLTFGCGTKAEIKRTVAAPSVFIFPPSDEQLKSGTASVVCLLNNFYPREAKVQWKVDNALQSGNSQESVTEQDSKDSTYSLSSTLTLSKADYEKHKVYACEVTHQGLSSPVTKSFNRGECGGGGSGGGGSGGGGSEPKSSDKTHTCPPCPAPELLGGPSVFLFPPKPKDTLMISRTPEVTCVVVDVSHEDPEVKFNWYVDGVEVHNAKTKPREEQYNSTYRVVSVLTVLHQDWLNGKEYKCKVSNKALPAPIEKTISKAKGQPREPQVYTLPPCREEMTKNQVSLWCLVKGFYPSDIAVEWESNGQPENNYKTTPPVLDSDGSFFLYSKLTVDKSRWQQGNVFSCSVMHEALHNHYTQKSLSLSPGK

SEQ ID NO: 594 - protein, 449 aa, synthetic construct
  REGION 1..449: note = EGM03 HC
QVQLQESGPGLVKPSETLSLTCTVSGGSVSSGDYYWTWIRQSPGKCLEWIGHIYYSGNTNYNPSLKSRLTISIDTSKTQFSLKLSSVTAADTAIYYCVRDRVTGAFDIWGQGTMVTVSSASTKGPSVFPLAPSSKSTSGGTAALGCLVKDYFPEPVTVSWNSGALTSGVHTFPAVLQSSGLYSLSSVVTVPSSSLGTQTYICNVNHKPSNTKVDKKVEPKSCDKTHTCPPCPAPELLGGPSVFLFPPKPKDTLMISRTPEVTCVVVDVSHEDPEVKFNWYVDGVEVHNAKTKPREEQYNSTYRVVSVLTVLHQDWLNGKEYKCKVSNKALPAPIEKTISKAKGQPREPQVYTLPPCREEMTKNQVSLWCLVKGFYPSDIAVEWESNGQPENNYKTTPPVLDSDGSFFLYSKLTVDKSRWQQGNVFSCSVMHEALHNHYTQKSLSLSPGK

SEQ ID NO: 595 - protein, 461 aa, synthetic construct
  REGION 1..461: note = EGM03 LC
DIQMTQSPSSLSASVGDRVTITCQASQDISNYLNWYQQKPGKAPKLLIYDASNLETGVPSRFSGSGSGTDFTFTISSLQPEDIATYFCQHFDHLPLAFGCGTKVEIKRTVAAPSVFIFPPSDEQLKSGTASVVCLLNNFYPREAKVQWKVDNALQSGNSQESVTEQDSKDSTYSLSSTLTLSKADYEKHKVYACEVTHQGLSSPVTKSFNRGECGGGGSGGGGSGGGGSEPKSSDKTHTCPPCPAPELLGGPSVFLFPPKPKDTLMISRTPEVTCVVVDVSHEDPEVKFNWYVDGVEVHNAKTKPREEQYNSTYRVVSVLTVLHQDWLNGKEYKCKVSNKALPAPIEKTISKAKGQPREPQVYTLPPCREEMTKNQVSLWCLVKGFYPSDIAVEWESNGQPENNYKTTPPVLDSDGSFFLYSKLTVDKSRWQQGNVFSCSVMHEALHNHYTQKSLSLSPGK

SEQ ID NO: 596 - protein, 451 aa, synthetic construct
  REGION 1..451: note = EGM04 HC
QVQLVQSGAEVKKPGASVKVSCKASGYTFTSHWMHWVRQAPGQCLEWIGEFNPSNGRTNYNEKFKSKATMTVDTSTNTAYMELSSLRSEDTAVYYCASRDYDYDGRYFDYWGQGTLVTVSSASTKGPSVFPLAPSSKSTSGGTAALGCLVKDYFPEPVTVSWNSGALTSGVHTFPAVLQSSGLYSLSSVVTVPSSSLGTQTYICNVNHKPSNTKVDKKVEPKSCDKTHTCPPCPAPELLGGPSVFLFPPKPKDTLMISRTPEVTCVVVDVSHEDPEVKFNWYVDGVEVHNAKTKPREEQYNSTYRVVSVLTVLHQDWLNGKEYKCKVSNKALPAPIEKTISKAKGQPREPQVYTLPPCREEMTKNQVSLWCLVKGFYPSDIAVEWESNGQPENNYKTTPPVLDSDGSFFLYSKLTVDKSRWQQGNVFSCSVMHEALHNHYTQKSLSLSPGK

SEQ ID NO: 597 - protein, 460 aa, synthetic construct
  REGION 1..460: note = EGM04 LC
DIQMTQSPSSLSASVGDRVTITCSASSSVTYMYWYQQKPGKAPKLLIYDTSNLASGVPSRFSGSGSGTDYTFTISSLQPEDIATYYCQQWSSHIFTFGCGTKVEIKRTVAAPSVFIFPPSDEQLKSGTASVVCLLNNFYPREAKVQWKVDNALQSGNSQESVTEQDSKDSTYSLSSTLTLSKADYEKHKVYACEVTHQGLSSPVTKSFNRGECGGGGSGGGGSGGGGSEPKSSDKTHTCPPCPAPELLGGPSVFLFPPKPKDTLMISRTPEVTCVVVDVSHEDPEVKFNWYVDGVEVHNAKTKPREEQYNSTYRVVSVLTVLHQDWLNGKEYKCKVSNKALPAPIEKTISKAKGQPREPQVYTLPPCREEMTKNQVSLWCLVKGFYPSDIAVEWESNGQPENNYKTTPPVLDSDGSFFLYSKLTVDKSRWQQGNVFSCSVMHEALHNHYTQKSLSLSPGK

SEQ ID NO: 598 - protein, 450 aa, synthetic construct
  REGION 1..450: note = EGM05 HC
QVQLVQSGAEVKKPGSSVKVSCKASGFTFTDYKIHWVRQAPGQCLEWMGYFNPNSGYSTYAQKFQGRVTITADKSTSTAYMELSSLRSEDTAVYYCARLSPGGYYVMDAWGQGTTVTVSSASTKGPSVFPLAPSSKSTSGGTAALGCLVKDYFPEPVTVSWNSGALTSGVHTFPAVLQSSGLYSLSSVVTVPSSSLGTQTYICNVNHKPSNTKVDKKVEPKSCDKTHTCPPCPAPELLGGPSVFLFPPKPKDTLMISRTPEVTCVVVDVSHEDPEVKFNWYVDGVEVHNAKTKPREEQYNSTYRVVSVLTVLHQDWLNGKEYKCKVSNKALPAPIEKTISKAKGQPREPQVYTLPPCREEMTKNQVSLWCLVKGFYPSDIAVEWESNGQPENNYKTTPPVLDSDGSFFLYSKLTVDKSRWQQGNVFSCSVMHEALHNHYTQKSLSLSPGK

SEQ ID NO: 599 - protein, 460 aa, synthetic construct
  REGION 1..460: note = EGM05 LC
DIQMTQSPSSLSASVGDRVTITCRASQGINNYLNWYQQKPGKAPKRLIYNTNNLQTGVPSRFSGSGSGTEFTLTISSLQPEDFATYYCLQHNSFPTFGCGTKLEIKRTVAAPSVFIFPPSDEQLKSGTASVVCLLNNFYPREAKVQWKVDNALQSGNSQESVTEQDSKDSTYSLSSTLTLSKADYEKHKVYACEVTHQGLSSPVTKSFNRGECGGGGSGGGGSGGGGSEPKSSDKTHTCPPCPAPELLGGPSVFLFPPKPKDTLMISRTPEVTCVVVDVSHEDPEVKFNWYVDGVEVHNAKTKPREEQYNSTYRVVSVLTVLHQDWLNGKEYKCKVSNKALPAPIEKTISKAKGQPREPQVYTLPPCREEMTKNQVSLWCLVKGFYPSDIAVEWESNGQPENNYKTTPPVLDSDGSFFLYSKLTVDKSRWQQGNVFSCSVMHEALHNHYTQKSLSLSPGK

SEQ ID NO: 600 - DNA, 1347 bp, synthetic construct
  source 1..1347: mol_type = other DNA
  misc_feature 1..1347: note = nucleotide sequence coding HC of EGM01
caagtacagttgaaacaatcagggcctggtttggtgcagccttcccaatcacttagcatcacctgcactgtctcagggttcagtcttacaaactacggcgtacactgggtacggcaaagccctggtaagtgcctggagtggcttggggttatatggtctggagggaataccgactataacacaccctttaccagcaggctgtccatcaataaagataactctaaatcccaggtcttctttaaaatgaactccctccagtctaatgacactgccatatattactgtgctagagcattgacttactacgattatgagttcgcatattggggacagggtactctggtcaccgtatccgctgctagcaccaaaggacctagtgtttttcctcttgccccttcctcaaagtctacctctggggggacagccgctctgggctgcctggtcaaggattatttcccagagcctgtcactgtcagttggaactctggagccttgacttctggtgttcatacatttcctgctgtccttcaaagcagcggcttgtactcattgtcttctgttgtgacagtaccctcaagcagcctcggcactcagacatacatctgcaatgtcaaccacaaaccctcaaatacaaaggtagataaaaaagtcgaaccaaagtcttgtgacaaaactcacacgtgcccaccgtgcccagcacctgaactcctggggggaccgtcagtcttcctcttccccccaaaacccaaggacaccctcatgatctcccggacccctgaggtcacatgcgtggtggtggacgtgagccacgaagaccctgaggtcaagttcaactggtacgtggacggcgtggaggtgcataatgccaagacaaagccgcgggaggagcagtacaacagcacgtaccgtgtggtcagcgtcctcaccgtcctgcaccaggactggctgaatggcaaggagtacaagtgcaaggtctccaacaaagccctcccagcccccatcgagaaaaccatctccaaagccaaagggcagccccgagaaccacaggtgtacaccctgcccccatgccgggaggagatgaccaagaaccaggtcagcctgtggtgcctggtcaaaggcttctatcccagcgacatcgccgtggagtgggagagcaatgggcagccggagaacaactacaagaccacgcctcccgtgctggactccgacggctccttcttcctctacagcaagctcaccgtggacaagagcaggtggcagcaggggaacgtcttctcatgctccgtgatgcatgaggctctgcacaaccactacacgcagaagagcctctccctgtctccgggtaaa

SEQ ID NO: 601 - DNA, 1383 bp, synthetic construct
  source 1..1383: mol_type = other DNA
  misc_feature 1..1383: note = nucleotide sequence coding LC of EGM01
gacatcttgcttactcaatcacctgtaatactttcagtttcaccaggtgaacgcgttagcttctcttgtagagcctcccaatctataggtactaatatccattggtatcagcagagaaccaacgggtctcctcgtttgctcattaaatatgcaagcgaatcaatctcagggattcctagccgttttagtggctctggcagtggtactgatttcacactcagcatcaattctgtagagagcgaagatattgcagactactattgccaacagaacaataattggcccacaaccttcgggtgtggcacaaaattggaactcaaacgtacggtggcagctcccagcgtttttatctttcccccatccgacgagcagctcaagagtggcactgcctctgtagtttgtttgctgaataacttctatccacgtgaagcaaaagtacagtggaaggtcgataatgcccttcagagcggtaacagccaagaaagtgttaccgagcaagattccaaagattccacttacagtctgtccagcacattgacactgagtaaggctgattacgaaaaacacaaggtgtacgcatgcgaggtgacacaccaaggtctttcatctcctgtaactaagagctttaaccggggagaatgtggtggtgggggcagcgggggcggaggtagtggaggcggcggtagtgaaccaaagagtagtgacaaaactcacacgtgcccaccgtgcccagcacctgaactcctggggggaccgtcagtcttcctcttccccccaaaacccaaggacaccctcatgatctcccggacccctgaggtcacatgcgtggtggtggacgtgagccacgaagaccctgaggtcaagttcaactggtacgtggacggcgtggaggtgcataatgccaagacaaagccgcgggaggagcagtacaacagcacgtaccgtgtggtcagcgtcctcaccgtcctgcaccaggactggctgaatggcaaggagtacaagtgcaaggtctccaacaaagccctcccagcccccatcgagaaaaccatctccaaagccaaagggcagccccgagaaccacaggtgtacaccctgcccccatgccgggaggagatgaccaagaaccaggtcagcctgtggtgcctggtcaaaggcttctatcccagcgacatcgccgtggagtgggagagcaatgggcagccggagaacaactacaagaccacgcctcccgtgctggactccgacggctccttcttcctctacagcaagctcaccgtggacaagagcaggtggcagcaggggaacgtcttctcatgctccgtgatgcatgaggctctgcacaaccactacacgcagaagagcctctccctgtctccgggtaaa

SEQ ID NO: 602 - DNA, 1353 bp, synthetic construct
  source 1..1353: mol_type = other DNA
  misc_feature 1..1353: note = nucleotide sequence coding HC of EGM02
caagtgcagcttcaagagtctggaccagggctggtcaagccctcccaaaccttgagcctcacctgtactgtttccgggggcagcataagttctggtgattactactggagttggatacgccaacctcccggaaaatgtctggagtggattgggtatatctattatagtggctcaacagactacaatccttctctcaagagtcgggtaactatgagcgtagatacaagtaaaaaccaattttcccttaaagtcaatagcgttacagccgctgacactgcagtttactactgtgcccgtgtttcaatcttcggtgtcggcactttcgattactggggtcagggtactctggttaccgtgtcatccgctagcaccaaaggacctagtgtttttcctcttgccccttcctcaaagtctacctctggggggacagccgctctgggctgcctggtcaaggattatttcccagagcctgtcactgtcagttggaactctggagccttgacttctggtgttcatacatttcctgctgtccttcaaagcagcggcttgtactcattgtcttctgttgtgacagtaccctcaagcagcctcggcactcagacatacatctgcaatgtcaaccacaaaccctcaaatacaaaggtagataaaaaagtcgaaccaaagtcttgtgacaaaactcacacgtgcccaccgtgcccagcacctgaactcctggggggaccgtcagtcttcctcttccccccaaaacccaaggacaccctcatgatctcccggacccctgaggtcacatgcgtggtggtggacgtgagccacgaagaccctgaggtcaagttcaactggtacgtggacggcgtggaggtgcataatgccaagacaaagccgcgggaggagcagtacaacagcacgtaccgtgtggtcagcgtcctcaccgtcctgcaccaggactggctgaatggcaaggagtacaagtgcaaggtctccaacaaagccctcccagcccccatcgagaaaaccatctccaaagccaaagggcagccccgagaaccacaggtgtacaccctgcccccatgccgggaggagatgaccaagaaccaggtcagcctgtggtgcctggtcaaaggcttctatcccagcgacatcgccgtggagtgggagagcaatgggcagccggagaacaactacaagaccacgcctcccgtgctggactccgacggctccttcttcctctacagcaagctcaccgtggacaagagcaggtggcagcaggggaacgtcttctcatgctccgtgatgcatgaggctctgcacaaccactacacgcagaagagcctctccctgtctccgggtaaa

SEQ ID NO: 603 - DNA, 1383 bp, synthetic construct
  source 1..1383: mol_type = other DNA
  misc_feature 1..1383: note = nucleotide sequence coding LC of EGM02
gagattgttatgacccaaagccctgcaacacttagtttgtctccaggagagcgcgccaccctttcttgtcgtgcatcccaaagcgttagcagctatctcgcctggtatcagcagaaacccggacaggctccacgattgctgatctacgacgcaagtaatagagctacaggaatacctgctcgtttctcaggctctggatctggcactgatttcaccttgaccataagcagcctggagcccgaggatttcgctgtatattattgccatcaatacgggagtacccccctcacattcggttgcgggactaaggccgaaattaaacgtacggtggcagctcccagcgtttttatctttcccccatccgacgagcagctcaagagtggcactgcctctgtagtttgtttgctgaataacttctatccacgtgaagcaaaagtacagtggaaggtcgataatgcccttcagagcggtaacagccaagaaagtgttaccgagcaagattccaaagattccacttacagtctgtccagcacattgacactgagtaaggctgattacgaaaaacacaaggtgtacgcatgcgaggtgacacaccaaggtctttcatctcctgtaactaagagctttaaccggggagaatgtggtggtgggggcagcgggggcggaggtagtggaggcggcggtagtgaaccaaagagtagtgacaaaactcacacgtgcccaccgtgcccagcacctgaactcctggggggaccgtcagtcttcctcttccccccaaaacccaaggacaccctcatgatctcccggacccctgaggtcacatgcgtggtggtggacgtgagccacgaagaccctgaggtcaagttcaactggtacgtggacggcgtggaggtgcataatgccaagacaaagccgcgggaggagcagtacaacagcacgtaccgtgtggtcagcgtcctcaccgtcctgcaccaggactggctgaatggcaaggagtacaagtgcaaggtctccaacaaagccctcccagcccccatcgagaaaaccatctccaaagccaaagggcagccccgagaaccacaggtgtacaccctgcccccatgccgggaggagatgaccaagaaccaggtcagcctgtggtgcctggtcaaaggcttctatcccagcgacatcgccgtggagtgggagagcaatgggcagccggagaacaactacaagaccacgcctcccgtgctggactccgacggctccttcttcctctacagcaagctcaccgtggacaagagcaggtggcagcaggggaacgtcttctcatgctccgtgatgcatgaggctctgcacaaccactacacgcagaagagcctctccctgtctccgggtaaa

SEQ ID NO: 604 - DNA, 1347 bp, synthetic construct
  source 1..1347: mol_type = other DNA
  misc_feature 1..1347: note = nucleotide sequence coding HC of EGM03
caggtacaacttcaagaaagtggtccaggtcttgtaaaaccctcagaaactttgagtctcacttgtaccgtcagtggcggaagtgtaagttctggcgattactactggacctggatacgccagtctccaggcaaatgtctggagtggataggccacatctactacagcgggaacaccaattacaatccatctcttaaatcaaggttgacaatttcaatagacaccagtaagacccagttttctctcaaacttagcagtgtaacagcagcagatactgcaatctactactgcgttagagaccgtgttacaggggctttcgacatctgggggcagggaactatggttaccgtctcttctgctagcaccaaaggacctagtgtttttcctcttgccccttcctcaaagtctacctctggggggacagccgctctgggctgcctggtcaaggattatttcccagagcctgtcactgtcagttggaactctggagccttgacttctggtgttcatacatttcctgctgtccttcaaagcagcggcttgtactcattgtcttctgttgtgacagtaccctcaagcagcctcggcactcagacatacatctgcaatgtcaaccacaaaccctcaaatacaaaggtagataaaaaagtcgaaccaaagtcttgtgacaaaactcacacgtgcccaccgtgcccagcacctgaactcctggggggaccgtcagtcttcctcttccccccaaaacccaaggacaccctcatgatctcccggacccctgaggtcacatgcgtggtggtggacgtgagccacgaagaccctgaggtcaagttcaactggtacgtggacggcgtggaggtgcataatgccaagacaaagccgcgggaggagcagtacaacagcacgtaccgtgtggtcagcgtcctcaccgtcctgcaccaggactggctgaatggcaaggagtacaagtgcaaggtctccaacaaagccctcccagcccccatcgagaaaaccatctccaaagccaaagggcagccccgagaaccacaggtgtacaccctgcccccatgccgggaggagatgaccaagaaccaggtcagcctgtggtgcctggtcaaaggcttctatcccagcgacatcgccgtggagtgggagagcaatgggcagccggagaacaactacaagaccacgcctcccgtgctggactccgacggctccttcttcctctacagcaagctcaccgtggacaagagcaggtggcagcaggggaacgtcttctcatgctccgtgatgcatgaggctctgcacaaccactacacgcagaagagcctctccctgtctccgggtaaa

SEQ ID NO: 605 - DNA, 1383 bp, synthetic construct
  source 1..1383: mol_type = other DNA
  misc_feature 1..1383: note = nucleotide sequence coding LC of EGM03
gacatacagatgacacagagtcctagctcattgtcagcctctgtcggtgaccgcgtcactatcacctgccaagccagccaagacatatcaaattatcttaactggtaccagcaaaagcctggaaaggctccaaaactgctgatttacgacgcctctaatttggagaccggggttccctctaggttcagcgggtctggttcaggcaccgactttacattcactatctcaagtctccagccagaggacatcgctacatacttttgccaacattttgaccatctgcccctggcatttgggtgtggcaccaaggtagaaattaagcgtacggtggcagctcccagcgtttttatctttcccccatccgacgagcagctcaagagtggcactgcctctgtagtttgtttgctgaataacttctatccacgtgaagcaaaagtacagtggaaggtcgataatgcccttcagagcggtaacagccaagaaagtgttaccgagcaagattccaaagattccacttacagtctgtccagcacattgacactgagtaaggctgattacgaaaaacacaaggtgtacgcatgcgaggtgacacaccaaggtctttcatctcctgtaactaagagctttaaccggggagaatgtggtggtgggggcagcgggggcggaggtagtggaggcggcggtagtgaaccaaagagtagtgacaaaactcacacgtgcccaccgtgcccagcacctgaactcctggggggaccgtcagtcttcctcttccccccaaaacccaaggacaccctcatgatctcccggacccctgaggtcacatgcgtggtggtggacgtgagccacgaagaccctgaggtcaagttcaactggtacgtggacggcgtggaggtgcataatgccaagacaaagccgcgggaggagcagtacaacagcacgtaccgtgtggtcagcgtcctcaccgtcctgcaccaggactggctgaatggcaaggagtacaagtgcaaggtctccaacaaagccctcccagcccccatcgagaaaaccatctccaaagccaaagggcagccccgagaaccacaggtgtacaccctgcccccatgccgggaggagatgaccaagaaccaggtcagcctgtggtgcctggtcaaaggcttctatcccagcgacatcgccgtggagtgggagagcaatgggcagccggagaacaactacaagaccacgcctcccgtgctggactccgacggctccttcttcctctacagcaagctcaccgtggacaagagcaggtggcagcaggggaacgtcttctcatgctccgtgatgcatgaggctctgcacaaccactacacgcagaagagcctctccctgtctccgggtaaa

SEQ ID NO: 606 - DNA, 1353 bp, synthetic construct
  source 1..1353: mol_type = other DNA
  misc_feature 1..1353: note = nucleotide sequence coding HC of EGM04
caagtccaactggtccaatctggggcagaggtcaagaaacctggcgcaagcgtaaaggtatcctgtaaagcatctggctacacattcacttcacattggatgcactgggttcggcaggcacctgggcaatgtcttgaatggattggggagtttaaccccagtaacgggaggactaactacaatgaaaagttcaagtccaaagcaaccatgaccgtcgataccagcacaaacactgcctacatggaactttcatcattgcgatctgaagacacagcagtatattactgtgccagtagggattacgactacgacggtcgctacttcgactattgggggcaaggtactttggtaacagtgagtagtgctagcaccaaaggacctagtgtttttcctcttgccccttcctcaaagtctacctctggggggacagccgctctgggctgcctggtcaaggattatttcccagagcctgtcactgtcagttggaactctggagccttgacttctggtgttcatacatttcctgctgtccttcaaagcagcggcttgtactcattgtcttctgttgtgacagtaccctcaagcagcctcggcactcagacatacatctgcaatgtcaaccacaaaccctcaaatacaaaggtagataaaaaagtcgaaccaaagtcttgtgacaaaactcacacgtgcccaccgtgcccagcacctgaactcctggggggaccgtcagtcttcctcttccccccaaaacccaaggacaccctcatgatctcccggacccctgaggtcacatgcgtggtggtggacgtgagccacgaagaccctgaggtcaagttcaactggtacgtggacggcgtggaggtgcataatgccaagacaaagccgcgggaggagcagtacaacagcacgtaccgtgtggtcagcgtcctcaccgtcctgcaccaggactggctgaatggcaaggagtacaagtgcaaggtctccaacaaagccctcccagcccccatcgagaaaaccatctccaaagccaaagggcagccccgagaaccacaggtgtacaccctgcccccatgccgggaggagatgaccaagaaccaggtcagcctgtggtgcctggtcaaaggcttctatcccagcgacatcgccgtggagtgggagagcaatgggcagccggagaacaactacaagaccacgcctcccgtgctggactccgacggctccttcttcctctacagcaagctcaccgtggacaagagcaggtggcagcaggggaacgtcttctcatgctccgtgatgcatgaggctctgcacaaccactacacgcagaagagcctctccctgtctccgggtaaa

SEQ ID NO: 607 - DNA, 1380 bp, synthetic construct
  source 1..1380: mol_type = other DNA
  misc_feature 1..1380: note = nucleotide sequence coding LC of EGM04
gacatacagatgacacaatccccatctagcctgtccgcaagtgttggggaccgtgtcactataacatgctcagcatcatcatcagtgacttatatgtactggtaccagcaaaagcccggaaaggcacctaaactgctcatttatgacaccagcaatcttgcttccggggttccttctcgattttccggttctggcagcggtactgactatacttttactatcagttctctgcaacctgaagacatcgcaacttactattgtcaacaatggtccagccacatctttacttttggatgtgggacaaaagtcgaaattaaacgtacggtggcagctcccagcgtttttatctttcccccatccgacgagcagctcaagagtggcactgcctctgtagtttgtttgctgaataacttctatccacgtgaagcaaaagtacagtggaaggtcgataatgcccttcagagcggtaacagccaagaaagtgttaccgagcaagattccaaagattccacttacagtctgtccagcacattgacactgagtaaggctgattacgaaaaacacaaggtgtacgcatgcgaggtgacacaccaaggtctttcatctcctgtaactaagagctttaaccggggagaatgtggtggtgggggcagcgggggcggaggtagtggaggcggcggtagtgaaccaaagagtagtgacaaaactcacacgtgcccaccgtgcccagcacctgaactcctggggggaccgtcagtcttcctcttccccccaaaacccaaggacaccctcatgatctcccggacccctgaggtcacatgcgtggtggtggacgtgagccacgaagaccctgaggtcaagttcaactggtacgtggacggcgtggaggtgcataatgccaagacaaagccgcgggaggagcagtacaacagcacgtaccgtgtggtcagcgtcctcaccgtcctgcaccaggactggctgaatggcaaggagtacaagtgcaaggtctccaacaaagccctcccagcccccatcgagaaaaccatctccaaagccaaagggcagccccgagaaccacaggtgtacaccctgcccccatgccgggaggagatgaccaagaaccaggtcagcctgtggtgcctggtcaaaggcttctatcccagcgacatcgccgtggagtgggagagcaatgggcagccggagaacaactacaagaccacgcctcccgtgctggactccgacggctccttcttcctctacagcaagctcaccgtggacaagagcaggtggcagcaggggaacgtcttctcatgctccgtgatgcatgaggctctgcacaaccactacacgcagaagagcctctccctgtctccgggtaaa

SEQ ID NO: 608 - DNA, 1350 bp, synthetic construct
  source 1..1350: mol_type = other DNA
  misc_feature 1..1350: note = nucleotide sequence coding HC of EGM05
caagtacaacttgttcaatctggagcagaggttaagaaacccggatcttccgttaaggttagttgcaaggcctccgggtttactttcactgactataaaatccattgggtccggcaggcccctgggcagtgtcttgaatggatgggctacttcaacccaaattctggttattccacttatgcccagaagtttcaaggcagggtcaccatcactgccgacaagtctacttcaaccgcctatatggaacttagcagtctgcgatcagaggatacagcagtctactactgcgccagactgtcacccggcggttattatgtgatggatgcttggggccagggcaccactgttacagtatcctctgctagcaccaaaggacctagtgtttttcctcttgccccttcctcaaagtctacctctggggggacagccgctctgggctgcctggtcaaggattatttcccagagcctgtcactgtcagttggaactctggagccttgacttctggtgttcatacatttcctgctgtccttcaaagcagcggcttgtactcattgtcttctgttgtgacagtaccctcaagcagcctcggcactcagacatacatctgcaatgtcaaccacaaaccctcaaatacaaaggtagataaaaaagtcgaaccaaagtcttgtgacaaaactcacacgtgcccaccgtgcccagcacctgaactcctggggggaccgtcagtcttcctcttccccccaaaacccaaggacaccctcatgatctcccggacccctgaggtcacatgcgtggtggtggacgtgagccacgaagaccctgaggtcaagttcaactggtacgtggacggcgtggaggtgcataatgccaagacaaagccgcgggaggagcagtacaacagcacgtaccgtgtggtcagcgtcctcaccgtcctgcaccaggactggctgaatggcaaggagtacaagtgcaaggtctccaacaaagccctcccagcccccatcgagaaaaccatctccaaagccaaagggcagccccgagaaccacaggtgtacaccctgcccccatgccgggaggagatgaccaagaaccaggtcagcctgtggtgcctggtcaaaggcttctatcccagcgacatcgccgtggagtgggagagcaatgggcagccggagaacaactacaagaccacgcctcccgtgctggactccgacggctccttcttcctctacagcaagctcaccgtggacaagagcaggtggcagcaggggaacgtcttctcatgctccgtgatgcatgaggctctgcacaaccactacacgcagaagagcctctccctgtctccgggtaaa

SEQ ID NO: 609 - DNA, 1380 bp, synthetic construct
  source 1..1380: mol_type = other DNA
  misc_feature 1..1380: note = nucleotide sequence coding LC of EGM05
gacattcagatgactcagtccccatcctctctgtctgccagcgtgggagatagggtcaccataacttgtcgggcatcccaagggatcaataactacctcaattggtatcaacaaaaacctggcaaggctcctaaaaggctgatttataacactaacaatctccaaaccggggtgccaagtcgctttagtgggtcagggagtggaacagagtttactcttactatctccagcctccagcccgaggactttgccacttactattgcctccaacacaactcatttccaacatttggttgtggcactaaacttgaaattaaacgtacggtggcagctcccagcgtttttatctttcccccatccgacgagcagctcaagagtggcactgcctctgtagtttgtttgctgaataacttctatccacgtgaagcaaaagtacagtggaaggtcgataatgcccttcagagcggtaacagccaagaaagtgttaccgagcaagattccaaagattccacttacagtctgtccagcacattgacactgagtaaggctgattacgaaaaacacaaggtgtacgcatgcgaggtgacacaccaaggtctttcatctcctgtaactaagagctttaaccggggagaatgtggtggtgggggcagcgggggcggaggtagtggaggcggcggtagtgaaccaaagagtagtgacaaaactcacacgtgcccaccgtgcccagcacctgaactcctggggggaccgtcagtcttcctcttccccccaaaacccaaggacaccctcatgatctcccggacccctgaggtcacatgcgtggtggtggacgtgagccacgaagaccctgaggtcaagttcaactggtacgtggacggcgtggaggtgcataatgccaagacaaagccgcgggaggagcagtacaacagcacgtaccgtgtggtcagcgtcctcaccgtcctgcaccaggactggctgaatggcaaggagtacaagtgcaaggtctccaacaaagccctcccagcccccatcgagaaaaccatctccaaagccaaagggcagccccgagaaccacaggtgtacaccctgcccccatgccgggaggagatgaccaagaaccaggtcagcctgtggtgcctggtcaaaggcttctatcccagcgacatcgccgtggagtgggagagcaatgggcagccggagaacaactacaagaccacgcctcccgtgctggactccgacggctccttcttcctctacagcaagctcaccgtggacaagagcaggtggcagcaggggaacgtcttctcatgctccgtgatgcatgaggctctgcacaaccactacacgcagaagagcctctccctgtctccgggtaaa

SEQ ID NO: 610 - protein, 119 aa, synthetic construct
  REGION 1..119: note = EGM01-VH
QVQLKQSGPGLVQPSQSLSITCTVSGFSLTNYGVHWVRQSPGKCLEWLGVIWSGGNTDYNTPFTSRLSINKDNSKSQVFFKMNSLQSNDTAIYYCARALTYYDYEFAYWGQGTLVTVSA

SEQ ID NO: 611 - protein, 107 aa, synthetic construct
  REGION 1..107: note = EGM01-VL
DILLTQSPVILSVSPGERVSFSCRASQSIGTNIHWYQQRTNGSPRLLIKYASESISGIPSRFSGSGSGTDFTLSINSVESEDIADYYCQQNNNWPTTFGCGTKLELK

SEQ ID NO: 612 - protein, 121 aa, synthetic construct
  REGION 1..121: note = EGM02-VH
QVQLQESGPGLVKPSQTLSLTCTVSGGSISSGDYYWSWIRQPPGKCLEWIGYIYYSGSTDYNPSLKSRVTMSVDTSKNQFSLKVNSVTAADTAVYYCARVSIFGVGTFDYWGQGTLVTVSS

SEQ ID NO: 613 - protein, 107 aa, synthetic construct
  REGION 1..107: note = EGM02-VL
EIVMTQSPATLSLSPGERATLSCRASQSVSSYLAWYQQKPGQAPRLLIYDASNRATGIPARFSGSGSGTDFTLTISSLEPEDFAVYYCHQYGSTPLTFGCGTKAEIK

SEQ ID NO: 614 - protein, 119 aa, synthetic construct
  REGION 1..119: note = EGM03-VH
QVQLQESGPGLVKPSETLSLTCTVSGGSVSSGDYYWTWIRQSPGKCLEWIGHIYYSGNTNYNPSLKSRLTISIDTSKTQFSLKLSSVTAADTAIYYCVRDRVTGAFDIWGQGTMVTVSS

SEQ ID NO: 615 - protein, 107 aa, synthetic construct
  REGION 1..107: note = EGM03-VL
DIQMTQSPSSLSASVGDRVTITCQASQDISNYLNWYQQKPGKAPKLLIYDASNLETGVPSRFSGSGSGTDFTFTISSLQPEDIATYFCQHFDHLPLAFGCGTKVEIK

SEQ ID NO: 616 - protein, 121 aa, synthetic construct
  REGION 1..121: note = EGM04-VH
QVQLVQSGAEVKKPGASVKVSCKASGYTFTSHWMHWVRQAPGQCLEWIGEFNPSNGRTNYNEKFKSKATMTVDTSTNTAYMELSSLRSEDTAVYYCASRDYDYDGRYFDYWGQGTLVTVSS

SEQ ID NO: 617 - protein, 106 aa, synthetic construct
  REGION 1..106: note = EGM04-VL
DIQMTQSPSSLSASVGDRVTITCSASSSVTYMYWYQQKPGKAPKLLIYDTSNLASGVPSRFSGSGSGTDYTFTISSLQPEDIATYYCQQWSSHIFTFGCGTKVEIK

SEQ ID NO: 618 - protein, 120 aa, synthetic construct
  REGION 1..120: note = EGM05-VH
QVQLVQSGAEVKKPGSSVKVSCKASGFTFTDYKIHWVRQAPGQCLEWMGYFNPNSGYSTYAQKFQGRVTITADKSTSTAYMELSSLRSEDTAVYYCARLSPGGYYVMDAWGQGTTVTVSS

SEQ ID NO: 619 - protein, 106 aa, synthetic construct
  REGION 1..106: note = EGM05-VL
DIQMTQSPSSLSASVGDRVTITCRASQGINNYLNWYQQKPGKAPKRLIYNTNNLQTGVPSRFSGSGSGTEFTLTISSLQPEDFATYYCLQHNSFPTFGCGTKLEIK

SEQ ID NO: 620 - DNA, 357 bp, synthetic construct
  source 1..357: mol_type = other DNA
  misc_feature 1..357: note = nucleotide sequence coding VH of EGM01
caagtacagttgaaacaatcagggcctggtttggtgcagccttcccaatcacttagcatcacctgcactgtctcagggttcagtcttacaaactacggcgtacactgggtacggcaaagccctggtaagtgcctggagtggcttggggttatatggtctggagggaataccgactataacacaccctttaccagcaggctgtccatcaataaagataactctaaatcccaggtcttctttaaaatgaactccctccagtctaatgacactgccatatattactgtgctagagcattgacttactacgattatgagttcgcatattggggacagggtactctggtcaccgtatccgct

SEQ ID NO: 621 - DNA, 321 bp, synthetic construct
  source 1..321: mol_type = other DNA
  misc_feature 1..321: note = nucleotide sequence codign VL of EGM01
gacatcttgcttactcaatcacctgtaatactttcagtttcaccaggtgaacgcgttagcttctcttgtagagcctcccaatctataggtactaatatccattggtatcagcagagaaccaacgggtctcctcgtttgctcattaaatatgcaagcgaatcaatctcagggattcctagccgttttagtggctctggcagtggtactgatttcacactcagcatcaattctgtagagagcgaagatattgcagactactattgccaacagaacaataattggcccacaaccttcgggtgtggcacaaaattggaactcaaa

SEQ ID NO: 622 - DNA, 363 bp, synthetic construct
  source 1..363: mol_type = other DNA
  misc_feature 1..363: note = nucleotide sequence coding VH of EGM02
caagtgcagcttcaagagtctggaccagggctggtcaagccctcccaaaccttgagcctcacctgtactgtttccgggggcagcataagttctggtgattactactggagttggatacgccaacctcccggaaaatgtctggagtggattgggtatatctattatagtggctcaacagactacaatccttctctcaagagtcgggtaactatgagcgtagatacaagtaaaaaccaattttcccttaaagtcaatagcgttacagccgctgacactgcagtttactactgtgcccgtgtttcaatcttcggtgtcggcactttcgattactggggtcagggtactctggttaccgtgtcatcc

SEQ ID NO: 623 - DNA, 321 bp, synthetic construct
  source 1..321: mol_type = other DNA
  misc_feature 1..321: note = nucleotide sequence coding VL of EGM02
gagattgttatgacccaaagccctgcaacacttagtttgtctccaggagagcgcgccaccctttcttgtcgtgcatcccaaagcgttagcagctatctcgcctggtatcagcagaaacccggacaggctccacgattgctgatctacgacgcaagtaatagagctacaggaatacctgctcgtttctcaggctctggatctggcactgatttcaccttgaccataagcagcctggagcccgaggatttcgctgtatattattgccatcaatacgggagtacccccctcacattcggttgcgggactaaggccgaaattaaa

SEQ ID NO: 624 - DNA, 321 bp, synthetic construct
  source 1..321: mol_type = other DNA
  misc_feature 1..321: note = nucleotide sequence coding VH of EGM03
gacatacagatgacacagagtcctagctcattgtcagcctctgtcggtgaccgcgtcactatcacctgccaagccagccaagacatatcaaattatcttaactggtaccagcaaaagcctggaaaggctccaaaactgctgatttacgacgcctctaatttggagaccggggttccctctaggttcagcgggtctggttcaggcaccgactttacattcactatctcaagtctccagccagaggacatcgctacatacttttgccaacattttgaccatctgcccctggcatttgggtgtggcaccaaggtagaaattaag

SEQ ID NO: 625 - DNA, 357 bp, synthetic construct
  source 1..357: mol_type = other DNA
  misc_feature 1..357: note = nucleotide sequence coding VL of EGM03
caggtacaacttcaagaaagtggtccaggtcttgtaaaaccctcagaaactttgagtctcacttgtaccgtcagtggcggaagtgtaagttctggcgattactactggacctggatacgccagtctccaggcaaatgtctggagtggataggccacatctactacagcgggaacaccaattacaatccatctcttaaatcaaggttgacaatttcaatagacaccagtaagacccagttttctctcaaacttagcagtgtaacagcagcagatactgcaatctactactgcgttagagaccgtgttacaggggctttcgacatctgggggcagggaactatggttaccgtctcttct

SEQ ID NO: 626 - DNA, 363 bp, synthetic construct
  source 1..363: mol_type = other DNA
  misc_feature 1..363: note = nucleotide sequence coding VH of EGM04
caagtccaactggtccaatctggggcagaggtcaagaaacctggcgcaagcgtaaaggtatcctgtaaagcatctggctacacattcacttcacattggatgcactgggttcggcaggcacctgggcaatgtcttgaatggattggggagtttaaccccagtaacgggaggactaactacaatgaaaagttcaagtccaaagcaaccatgaccgtcgataccagcacaaacactgcctacatggaactttcatcattgcgatctgaagacacagcagtatattactgtgccagtagggattacgactacgacggtcgctacttcgactattgggggcaaggtactttggtaacagtgagtagt

SEQ ID NO: 627 - DNA, 318 bp, synthetic construct
  source 1..318: mol_type = other DNA
  misc_feature 1..318: note = nucleotide sequence coding VL of EGM04
gacatacagatgacacaatccccatctagcctgtccgcaagtgttggggaccgtgtcactataacatgctcagcatcatcatcagtgacttatatgtactggtaccagcaaaagcccggaaaggcacctaaactgctcatttatgacaccagcaatcttgcttccggggttccttctcgattttccggttctggcagcggtactgactatacttttactatcagttctctgcaacctgaagacatcgcaacttactattgtcaacaatggtccagccacatctttacttttggatgtgggacaaaagtcgaaattaaa

SEQ ID NO: 628 - DNA, 360 bp, synthetic construct
  source 1..360: mol_type = other DNA
  misc_feature 1..360: note = nucleotide sequence coding VH of EGM05
caagtacaacttgttcaatctggagcagaggttaagaaacccggatcttccgttaaggttagttgcaaggcctccgggtttactttcactgactataaaatccattgggtccggcaggcccctgggcagtgtcttgaatggatgggctacttcaacccaaattctggttattccacttatgcccagaagtttcaaggcagggtcaccatcactgccgacaagtctacttcaaccgcctatatggaacttagcagtctgcgatcagaggatacagcagtctactactgcgccagactgtcacccggcggttattatgtgatggatgcttggggccagggcaccactgttacagtatcctct

SEQ ID NO: 629 - DNA, 318 bp, synthetic construct
  source 1..318: mol_type = other DNA
  misc_feature 1..318: note = nucleotide sequence coding VL of EGM05
gacattcagatgactcagtccccatcctctctgtctgccagcgtgggagatagggtcaccataacttgtcgggcatcccaagggatcaataactacctcaattggtatcaacaaaaacctggcaaggctcctaaaaggctgatttataacactaacaatctccaaaccggggtgccaagtcgctttagtgggtcagggagtggaacagagtttactcttactatctccagcctccagcccgaggactttgccacttactattgcctccaacacaactcatttccaacatttggttgtggcactaaacttgaaattaaa

SEQ ID NO: 630 - protein, 5 aa, synthetic construct
  REGION 1..5: note = VH-CDR1 of EGM04
SHWMH

SEQ ID NO: 631 - protein, 17 aa, synthetic construct
  REGION 1..17: note = VH-CDR2 of EGM04
EFNPSNGRTNYNEKFKS

SEQ ID NO: 632 - protein, 12 aa, synthetic construct
  REGION 1..12: note = VH-CDR3 of EGM04
RDYDYDGRYFDY

SEQ ID NO: 633 - protein, 10 aa, synthetic construct
  REGION 1..10: note = VL-CDR1 of EGM04
SASSSVTYMY

SEQ ID NO: 634 - protein, 7 aa, synthetic construct
  REGION 1..7: note = VL-CDR2 of EGM04
DTSNLAS

SEQ ID NO: 635 - protein, 9 aa, synthetic construct
  REGION 1..9: note = VL-CDR3 of EGM04
QQWSSHIFT

SEQ ID NO: 636 - protein, 446 aa, synthetic construct
  REGION 1..446: note = 33-1 HC
EVQLVQSGAEVKKPGSSVKVSCKASGYTITDSNIHWVRQAPGQCLEWIGYIYPYNGGTDYNQKFKNRATLTVDNPTNTAYMELSSLRSEDTAFYYCVNGNPWLAYWGQGTLVTVSSASTKGPSVFPLAPSSKSTSGGTAALGCLVKDYFPEPVTVSWNSGALTSGVHTFPAVLQSSGLYSLSSVVTVPSSSLGTQTYICNVNHKPSNTKVDKKVEPKSCDKTHTCPPCPAPELLGGPSVFLFPPKPKDTLMISRTPEVTCVVVDVSHEDPEVKFNWYVDGVEVHNAKTKPREEQYNSTYRVVSVLTVLHQDWLNGKEYKCKVSNKALPAPIEKTISKAKGQPREPQVYTLPPCREEMTKNQVSLWCLVKGFYPSDIAVEWESNGQPENNYKTTPPVLDSDGSFFLYSKLTVDKSRWQQGNVFSCSVMHEALHNHYTQKSLSLSPGK

SEQ ID NO: 637 - protein, 465 aa, synthetic construct
  REGION 1..465: note = 33-1 LC
DIQLTQSPSTLSASVGDRVTITCRASESLDNYGIRFLTWFQQKPGKAPKLLMYAASNQGSGVPSRFSGSGSGTEFTLTISSLQPDDFATYYCQQTKEVPWSFGCGTKVEVKRTVAAPSVFIFPPSDEQLKSGTASVVCLLNNFYPREAKVQWKVDNALQSGNSQESVTEQDSKDSTYSLSSTLTLSKADYEKHKVYACEVTHQGLSSPVTKSFNRGECGGGGSGGGGSGGGGSEPKSSDKTHTCPPCPAPELLGGPSVFLFPPKPKDTLMISRTPEVTCVVVDVSHEDPEVKFNWYVDGVEVHNAKTKPREEQYNSTYRVVSVLTVLHQDWLNGKEYKCKVSNKALPAPIEKTISKAKGQPREPQVYTLPPCREEMTKNQVSLWCLVKGFYPSDIAVEWESNGQPENNYKTTPPVLDSDGSFFLYSKLTVDKSRWQQGNVFSCSVMHEALHNHYTQKSLSLSPGK

SEQ ID NO: 638 - protein, 446 aa, synthetic construct
  REGION 1..446: note = 33-2 HC
QVQLVQSGAEVKKPGSSVKVSCKASGYTFTDYNMHWVRQAPGQCLEWIGYIYPYNGGTGYNQKFKSKATITADESTNTAYMELSSLRSEDTAVYYCARGRPAMDYWGQGTLVTVSSASTKGPSVFPLAPSSKSTSGGTAALGCLVKDYFPEPVTVSWNSGALTSGVHTFPAVLQSSGLYSLSSVVTVPSSSLGTQTYICNVNHKPSNTKVDKKVEPKSCDKTHTCPPCPAPELLGGPSVFLFPPKPKDTLMISRTPEVTCVVVDVSHEDPEVKFNWYVDGVEVHNAKTKPREEQYNSTYRVVSVLTVLHQDWLNGKEYKCKVSNKALPAPIEKTISKAKGQPREPQVYTLPPCREEMTKNQVSLWCLVKGFYPSDIAVEWESNGQPENNYKTTPPVLDSDGSFFLYSKLTVDKSRWQQGNVFSCSVMHEALHNHYTQKSLSLSPGK

SEQ ID NO: 639 - protein, 465 aa, synthetic construct
  REGION 1..465: note = 33-2 LC
DIQMTQSPSSLSASVGDRVTITCRASESVDNYGISFMNWFQQKPGKAPKLLIYAASNQGSGVPSRFSGSGSGTDFTLTISSLQPDDFATYYCQQSKEVPWTFGCGTKVEIKRTVAAPSVFIFPPSDEQLKSGTASVVCLLNNFYPREAKVQWKVDNALQSGNSQESVTEQDSKDSTYSLSSTLTLSKADYEKHKVYACEVTHQGLSSPVTKSFNRGECGGGGSGGGGSGGGGSEPKSSDKTHTCPPCPAPELLGGPSVFLFPPKPKDTLMISRTPEVTCVVVDVSHEDPEVKFNWYVDGVEVHNAKTKPREEQYNSTYRVVSVLTVLHQDWLNGKEYKCKVSNKALPAPIEKTISKAKGQPREPQVYTLPPCREEMTKNQVSLWCLVKGFYPSDIAVEWESNGQPENNYKTTPPVLDSDGSFFLYSKLTVDKSRWQQGNVFSCSVMHEALHNHYTQKSLSLSPGK

SEQ ID NO: 640 - protein, 448 aa, synthetic construct
  REGION 1..448: note = 33-3 HC
QVQLQQPGAEVVKPGASVKMSCKASGYTFTSYYIHWIKQTPGQCLEWVGVIYPGNDDISYNQKFQGKATLTADKSSTTAYMQLSSLTSEDSAVYYCAREVRLRYFDVWGQGTTVTVSSASTKGPSVFPLAPSSKSTSGGTAALGCLVKDYFPEPVTVSWNSGALTSGVHTFPAVLQSSGLYSLSSVVTVPSSSLGTQTYICNVNHKPSNTKVDKKVEPKSCDKTHTCPPCPAPELLGGPSVFLFPPKPKDTLMISRTPEVTCVVVDVSHEDPEVKFNWYVDGVEVHNAKTKPREEQYNSTYRVVSVLTVLHQDWLNGKEYKCKVSNKALPAPIEKTISKAKGQPREPQVYTLPPCREEMTKNQVSLWCLVKGFYPSDIAVEWESNGQPENNYKTTPPVLDSDGSFFLYSKLTVDKSRWQQGNVFSCSVMHEALHNHYTQKSLSLSPGK

SEQ ID NO: 641 - protein, 466 aa, synthetic construct
  REGION 1..466: note = 33-3 LC
EIVLTQSPGSLAVSPGERVTMSCKSSQSVFFSSSQKNYLAWYQQIPGQSPRLLIYWASTRESGVPDRFTGSGSGTDFTLTISSVQPEDLAIYYCHQYLSSRTFGCGTKLEIKRTVAAPSVFIFPPSDEQLKSGTASVVCLLNNFYPREAKVQWKVDNALQSGNSQESVTEQDSKDSTYSLSSTLTLSKADYEKHKVYACEVTHQGLSSPVTKSFNRGECGGGGSGGGGSGGGGSEPKSSDKTHTCPPCPAPELLGGPSVFLFPPKPKDTLMISRTPEVTCVVVDVSHEDPEVKFNWYVDGVEVHNAKTKPREEQYNSTYRVVSVLTVLHQDWLNGKEYKCKVSNKALPAPIEKTISKAKGQPREPQVYTLPPCREEMTKNQVSLWCLVKGFYPSDIAVEWESNGQPENNYKTTPPVLDSDGSFFLYSKLTVDKSRWQQGNVFSCSVMHEALHNHYTQKSLSLSPGK

SEQ ID NO: 642 - protein, 575 aa, synthetic construct
  REGION 1..575: note = 33-4 HC
EVQLVQSGAEVKKPGSSVKVSCKASGYTITDSNIHWVRQAPGQSLEWIGYIYPYNGGTDYNQKFKNRATLTVDNPTNTAYMELSSLRSEDTAFYYCVNGNPWLAYWGQGTLVTVSSASTKGPSVFPLAPQVQLVQSGAEVKKPGSSVKVSCKASGYTFTDYNMHWVRQAPGQCLEWIGYIYPYNGGTGYNQKFKSKATITADESTNTAYMELSSLRSEDTAVYYCARGRPAMDYWGQGTLVTVSSASTKGPSVFPLAPSSKSTSGGTAALGCLVKDYFPEPVTVSWNSGALTSGVHTFPAVLQSSGLYSLSSVVTVPSSSLGTQTYICNVNHKPSNTKVDKKVEPKSCDKTHTCPPCPAPELLGGPSVFLFPPKPKDTLMISRTPEVTCVVVDVSHEDPEVKFNWYVDGVEVHNAKTKPREEQYNSTYRVVSVLTVLHQDWLNGKEYKCKVSNKALPAPIEKTISKAKGQPREPQVYTLPPCREEMTKNQVSLWCLVKGFYPSDIAVEWESNGQPENNYKTTPPVLDSDGSFFLYSKLTVDKSRWQQGNVFSCSVMHEALHNHYTQKSLSLSPGK

SEQ ID NO: 643 - protein, 589 aa, synthetic construct
  REGION 1..589: note = 33-4 LC
DIQLTQSPSTLSASVGDRVTITCRASESLDNYGIRFLTWFQQKPGKAPKLLMYAASNQGSGVPSRFSGSGSGTEFTLTISSLQPDDFATYYCQQTKEVPWSFGQGTKVEVKRTVAAPSVFIFPPDIQMTQSPSSLSASVGDRVTITCRASESVDNYGISFMNWFQQKPGKAPKLLIYAASNQGSGVPSRFSGSGSGTDFTLTISSLQPDDFATYYCQQSKEVPWTFGCGTKVEIKRTVAAPSVFIFPPSDEQLKSGTASVVCLLNNFYPREAKVQWKVDNALQSGNSQESVTEQDSKDSTYSLSSTLTLSKADYEKHKVYACEVTHQGLSSPVTKSFNRGECGGGGSGGGGSGGGGSEPKSSDKTHTCPPCPAPELLGGPSVFLFPPKPKDTLMISRTPEVTCVVVDVSHEDPEVKFNWYVDGVEVHNAKTKPREEQYNSTYRVVSVLTVLHQDWLNGKEYKCKVSNKALPAPIEKTISKAKGQPREPQVYTLPPCREEMTKNQVSLWCLVKGFYPSDIAVEWESNGQPENNYKTTPPVLDSDGSFFLYSKLTVDKSRWQQGNVFSCSVMHEALHNHYTQKSLSLSPGK

SEQ ID NO: 644 - protein, 577 aa, synthetic construct
  REGION 1..577: note = 33-5 HC
QVQLQQPGAEVVKPGASVKMSCKASGYTFTSYYIHWIKQTPGQGLEWVGVIYPGNDDISYNQKFQGKATLTADKSSTTAYMQLSSLTSEDSAVYYCAREVRLRYFDVWGQGTTVTVSSASTKGPSVFPLAPQVQLVQSGAEVKKPGSSVKVSCKASGYTFTDYNMHWVRQAPGQCLEWIGYIYPYNGGTGYNQKFKSKATITADESTNTAYMELSSLRSEDTAVYYCARGRPAMDYWGQGTLVTVSSASTKGPSVFPLAPSSKSTSGGTAALGCLVKDYFPEPVTVSWNSGALTSGVHTFPAVLQSSGLYSLSSVVTVPSSSLGTQTYICNVNHKPSNTKVDKKVEPKSCDKTHTCPPCPAPELLGGPSVFLFPPKPKDTLMISRTPEVTCVVVDVSHEDPEVKFNWYVDGVEVHNAKTKPREEQYNSTYRVVSVLTVLHQDWLNGKEYKCKVSNKALPAPIEKTISKAKGQPREPQVYTLPPCREEMTKNQVSLWCLVKGFYPSDIAVEWESNGQPENNYKTTPPVLDSDGSFFLYSKLTVDKSRWQQGNVFSCSVMHEALHNHYTQKSLSLSPGK

SEQ ID NO: 645 - protein, 590 aa, synthetic construct
  REGION 1..590: note = 33-5 LC
EIVLTQSPGSLAVSPGERVTMSCKSSQSVFFSSSQKNYLAWYQQIPGQSPRLLIYWASTRESGVPDRFTGSGSGTDFTLTISSVQPEDLAIYYCHQYLSSRTFGQGTKLEIKRTVAAPSVFIFPPDIQMTQSPSSLSASVGDRVTITCRASESVDNYGISFMNWFQQKPGKAPKLLIYAASNQGSGVPSRFSGSGSGTDFTLTISSLQPDDFATYYCQQSKEVPWTFGCGTKVEIKRTVAAPSVFIFPPSDEQLKSGTASVVCLLNNFYPREAKVQWKVDNALQSGNSQESVTEQDSKDSTYSLSSTLTLSKADYEKHKVYACEVTHQGLSSPVTKSFNRGECGGGGSGGGGSGGGGSEPKSSDKTHTCPPCPAPELLGGPSVFLFPPKPKDTLMISRTPEVTCVVVDVSHEDPEVKFNWYVDGVEVHNAKTKPREEQYNSTYRVVSVLTVLHQDWLNGKEYKCKVSNKALPAPIEKTISKAKGQPREPQVYTLPPCREEMTKNQVSLWCLVKGFYPSDIAVEWESNGQPENNYKTTPPVLDSDGSFFLYSKLTVDKSRWQQGNVFSCSVMHEALHNHYTQKSLSLSPGK

SEQ ID NO: 646 - protein, 575 aa, synthetic construct
  REGION 1..575: note = 33-6 HC
QVQLVQSGAEVKKPGSSVKVSCKASGYTFTDYNMHWVRQAPGQGLEWIGYIYPYNGGTGYNQKFKSKATITADESTNTAYMELSSLRSEDTAVYYCARGRPAMDYWGQGTLVTVSSASTKGPSVFPLAPEVQLVQSGAEVKKPGSSVKVSCKASGYTITDSNIHWVRQAPGQCLEWIGYIYPYNGGTDYNQKFKNRATLTVDNPTNTAYMELSSLRSEDTAFYYCVNGNPWLAYWGQGTLVTVSSASTKGPSVFPLAPSSKSTSGGTAALGCLVKDYFPEPVTVSWNSGALTSGVHTFPAVLQSSGLYSLSSVVTVPSSSLGTQTYICNVNHKPSNTKVDKKVEPKSCDKTHTCPPCPAPELLGGPSVFLFPPKPKDTLMISRTPEVTCVVVDVSHEDPEVKFNWYVDGVEVHNAKTKPREEQYNSTYRVVSVLTVLHQDWLNGKEYKCKVSNKALPAPIEKTISKAKGQPREPQVYTLPPCREEMTKNQVSLWCLVKGFYPSDIAVEWESNGQPENNYKTTPPVLDSDGSFFLYSKLTVDKSRWQQGNVFSCSVMHEALHNHYTQKSLSLSPGK

SEQ ID NO: 647 - protein, 465 aa, synthetic construct
  REGION 1..465: note = 33-6 LC
DIQMTQSPSSLSASVGDRVTITCRASESVDNYGISFMNWFQQKPGKAPKLLIYAASNQGSGVPSRFSGSGSGTDFTLTISSLQPDDFATYYCQQSKEVPWTFGQGTKVEIKRTVAAPSVFIFPPSDEQLKSGTASVVCLLNNFYPREAKVQWKVDNALQSGNSQESVTEQDSKDSTYSLSSTLTLSKADYEKHKVYACEVTHQGLSSPVTKSFNRGECGGGGSGGGGSGGGGSEPKSSDKTHTCPPCPAPELLGGPSVFLFPPKPKDTLMISRTPEVTCVVVDVSHEDPEVKFNWYVDGVEVHNAKTKPREEQYNSTYRVVSVLTVLHQDWLNGKEYKCKVSNKALPAPIEKTISKAKGQPREPQVYTLPPCREEMTKNQVSLWCLVKGFYPSDIAVEWESNGQPENNYKTTPPVLDSDGSFFLYSKLTVDKSRWQQGNVFSCSVMHEALHNHYTQKSLSLSPGK

SEQ ID NO: 648 - protein, 577 aa, synthetic construct
  REGION 1..577: note = 33-7 HC
QVQLVQSGAEVKKPGSSVKVSCKASGYTFTDYNMHWVRQAPGQGLEWIGYIYPYNGGTGYNQKFKSKATITADESTNTAYMELSSLRSEDTAVYYCARGRPAMDYWGQGTLVTVSSASTKGPSVFPLAPQVQLQQPGAEVVKPGASVKMSCKASGYTFTSYYIHWIKQTPGQCLEWVGVIYPGNDDISYNQKFQGKATLTADKSSTTAYMQLSSLTSEDSAVYYCAREVRLRYFDVWGQGTTVTVSSASTKGPSVFPLAPSSKSTSGGTAALGCLVKDYFPEPVTVSWNSGALTSGVHTFPAVLQSSGLYSLSSVVTVPSSSLGTQTYICNVNHKPSNTKVDKKVEPKSCDKTHTCPPCPAPELLGGPSVFLFPPKPKDTLMISRTPEVTCVVVDVSHEDPEVKFNWYVDGVEVHNAKTKPREEQYNSTYRVVSVLTVLHQDWLNGKEYKCKVSNKALPAPIEKTISKAKGQPREPQVYTLPPCREEMTKNQVSLWCLVKGFYPSDIAVEWESNGQPENNYKTTPPVLDSDGSFFLYSKLTVDKSRWQQGNVFSCSVMHEALHNHYTQKSLSLSPGK

SEQ ID NO: 649 - protein, 590 aa, synthetic construct
  REGION 1..590: note = 33-7 LC
DIQMTQSPSSLSASVGDRVTITCRASESVDNYGISFMNWFQQKPGKAPKLLIYAASNQGSGVPSRFSGSGSGTDFTLTISSLQPDDFATYYCQQSKEVPWTFGQGTKVEIKRTVAAPSVFIFPPEIVLTQSPGSLAVSPGERVTMSCKSSQSVFFSSSQKNYLAWYQQIPGQSPRLLIYWASTRESGVPDRFTGSGSGTDFTLTISSVQPEDLAIYYCHQYLSSRTFGCGTKLEIKRTVAAPSVFIFPPSDEQLKSGTASVVCLLNNFYPREAKVQWKVDNALQSGNSQESVTEQDSKDSTYSLSSTLTLSKADYEKHKVYACEVTHQGLSSPVTKSFNRGECGGGGSGGGGSGGGGSEPKSSDKTHTCPPCPAPELLGGPSVFLFPPKPKDTLMISRTPEVTCVVVDVSHEDPEVKFNWYVDGVEVHNAKTKPREEQYNSTYRVVSVLTVLHQDWLNGKEYKCKVSNKALPAPIEKTISKAKGQPREPQVYTLPPCREEMTKNQVSLWCLVKGFYPSDIAVEWESNGQPENNYKTTPPVLDSDGSFFLYSKLTVDKSRWQQGNVFSCSVMHEALHNHYTQKSLSLSPGK

SEQ ID NO: 650 - DNA, 1338 bp, synthetic construct
  source 1..1338: mol_type = other DNA
  misc_feature 1..1338: note = nucleotide sequence coding HC of 33-1
gaggttcagttggttcagtcaggagcagaggtcaaaaaacctggaagctctgtcaaagttagttgtaaggccagtggatacaccataaccgattcaaatatacattgggttaggcaagcaccaggacagtgcttggaatggatcgggtacatctatccatataatgggggcaccgattacaaccaaaagtttaagaatcgcgccacactcactgttgataatccaaccaatacagcatacatggagttgagcagtcttcggtccgaggacactgctttttactattgtgtgaacggtaacccatggttggcctattggggccaaggtacacttgtaacagtttcatctgctagcaccaaaggacctagtgtttttcctcttgccccttcctcaaagtctacctctggggggacagccgctctgggctgcctggtcaaggattatttcccagagcctgtcactgtcagttggaactctggagccttgacttctggtgttcatacatttcctgctgtccttcaaagcagcggcttgtactcattgtcttctgttgtgacagtaccctcaagcagcctcggcactcagacatacatctgcaatgtcaaccacaaaccctcaaatacaaaggtagataaaaaagtcgaaccaaagtcttgtgacaaaactcacacgtgcccaccgtgcccagcacctgaactcctggggggaccgtcagtcttcctcttccccccaaaacccaaggacaccctcatgatctcccggacccctgaggtcacatgcgtggtggtggacgtgagccacgaagaccctgaggtcaagttcaactggtacgtggacggcgtggaggtgcataatgccaagacaaagccgcgggaggagcagtacaacagcacgtaccgtgtggtcagcgtcctcaccgtcctgcaccaggactggctgaatggcaaggagtacaagtgcaaggtctccaacaaagccctcccagcccccatcgagaaaaccatctccaaagccaaagggcagccccgagaaccacaggtgtacaccctgcccccatgccgggaggagatgaccaagaaccaggtcagcctgtggtgcctggtcaaaggcttctatcccagcgacatcgccgtggagtgggagagcaatgggcagccggagaacaactacaagaccacgcctcccgtgctggactccgacggctccttcttcctctacagcaagctcaccgtggacaagagcaggtggcagcaggggaacgtcttctcatgctccgtgatgcatgaggctctgcacaaccactacacgcagaagagcctctccctgtctccgggtaaa

SEQ ID NO: 651 - DNA, 1395 bp, synthetic construct
  source 1..1395: mol_type = other DNA
  misc_feature 1..1395: note = nucleotide sequence coding LC of 33-1
gatatacaactgactcagagtcccagcactctcagtgcaagtgtaggcgatagagtaactataacctgtcgcgcctcagaatctcttgataattatgggatccgatttcttacttggtttcagcaaaagcctggtaaagctcctaaattgctcatgtatgccgccagtaatcagggttcaggagttcctagtcgtttctctgggtcaggaagcggcacagaatttacccttacaatttccagcctccagcccgacgatttcgccacttactattgccaacaaactaaagaggttccttggagttttgggtgtggcaccaaggtagaagtaaaacgtacggtggcagctcccagcgtttttatctttcccccatccgacgagcagctcaagagtggcactgcctctgtagtttgtttgctgaataacttctatccacgtgaagcaaaagtacagtggaaggtcgataatgcccttcagagcggtaacagccaagaaagtgttaccgagcaagattccaaagattccacttacagtctgtccagcacattgacactgagtaaggctgattacgaaaaacacaaggtgtacgcatgcgaggtgacacaccaaggtctttcatctcctgtaactaagagctttaaccggggagaatgtggtggtgggggcagcgggggcggaggtagtggaggcggcggtagtgaaccaaagagtagtgacaaaactcacacgtgcccaccgtgcccagcacctgaactcctggggggaccgtcagtcttcctcttccccccaaaacccaaggacaccctcatgatctcccggacccctgaggtcacatgcgtggtggtggacgtgagccacgaagaccctgaggtcaagttcaactggtacgtggacggcgtggaggtgcataatgccaagacaaagccgcgggaggagcagtacaacagcacgtaccgtgtggtcagcgtcctcaccgtcctgcaccaggactggctgaatggcaaggagtacaagtgcaaggtctccaacaaagccctcccagcccccatcgagaaaaccatctccaaagccaaagggcagccccgagaaccacaggtgtacaccctgcccccatgccgggaggagatgaccaagaaccaggtcagcctgtggtgcctggtcaaaggcttctatcccagcgacatcgccgtggagtgggagagcaatgggcagccggagaacaactacaagaccacgcctcccgtgctggactccgacggctccttcttcctctacagcaagctcaccgtggacaagagcaggtggcagcaggggaacgtcttctcatgctccgtgatgcatgaggctctgcacaaccactacacgcagaagagcctctccctgtctccgggtaaa

SEQ ID NO: 652 - DNA, 1338 bp, synthetic construct
  source 1..1338: mol_type = other DNA
  misc_feature 1..1338: note = nucleotide sequence coding HC of 33-2
caggtacagcttgtgcaatctggagctgaggtcaaaaaaccaggaagttctgtaaaggtgtcttgtaaggcatctggttacacatttaccgattacaacatgcattgggtacgtcaagcccctggccagtgcctggaatggatcggatatatatacccctacaacggtggaacaggttacaaccaaaaattcaaaagcaaggctactatcactgccgacgagagcactaacaccgcttacatggaactgtcttccttgcgttcagaagacactgccgtgtattattgtgctcgggggcgacccgcaatggactattggggccaaggtacattggtgactgtcagttccgctagcaccaaaggacctagtgtttttcctcttgccccttcctcaaagtctacctctggggggacagccgctctgggctgcctggtcaaggattatttcccagagcctgtcactgtcagttggaactctggagccttgacttctggtgttcatacatttcctgctgtccttcaaagcagcggcttgtactcattgtcttctgttgtgacagtaccctcaagcagcctcggcactcagacatacatctgcaatgtcaaccacaaaccctcaaatacaaaggtagataaaaaagtcgaaccaaagtcttgtgacaaaactcacacgtgcccaccgtgcccagcacctgaactcctggggggaccgtcagtcttcctcttccccccaaaacccaaggacaccctcatgatctcccggacccctgaggtcacatgcgtggtggtggacgtgagccacgaagaccctgaggtcaagttcaactggtacgtggacggcgtggaggtgcataatgccaagacaaagccgcgggaggagcagtacaacagcacgtaccgtgtggtcagcgtcctcaccgtcctgcaccaggactggctgaatggcaaggagtacaagtgcaaggtctccaacaaagccctcccagcccccatcgagaaaaccatctccaaagccaaagggcagccccgagaaccacaggtgtacaccctgcccccatgccgggaggagatgaccaagaaccaggtcagcctgtggtgcctggtcaaaggcttctatcccagcgacatcgccgtggagtgggagagcaatgggcagccggagaacaactacaagaccacgcctcccgtgctggactccgacggctccttcttcctctacagcaagctcaccgtggacaagagcaggtggcagcaggggaacgtcttctcatgctccgtgatgcatgaggctctgcacaaccactacacgcagaagagcctctccctgtctccgggtaaa

SEQ ID NO: 653 - DNA, 1395 bp, synthetic construct
  source 1..1395: mol_type = other DNA
  misc_feature 1..1395: note = nucleotide sequence coding LC of 33-2
gacatccaaatgacacagtcccctagctcactttcagcaagcgtgggggaccgagttactatcacatgccgcgcaagtgagtctgtggacaactatggaatatcattcatgaactggttccagcagaaacctgggaaagcacccaagctgcttatctacgcagcaagtaatcagggtagtggcgtcccttctcgattcagtgggagcggtagcggcaccgacttcacccttaccatctcatcacttcaacccgatgattttgctacctactattgccagcaatccaaggaagttccttggaccttcgggtgtgggacaaaggtagagattaaacgtacggtggcagctcccagcgtttttatctttcccccatccgacgagcagctcaagagtggcactgcctctgtagtttgtttgctgaataacttctatccacgtgaagcaaaagtacagtggaaggtcgataatgcccttcagagcggtaacagccaagaaagtgttaccgagcaagattccaaagattccacttacagtctgtccagcacattgacactgagtaaggctgattacgaaaaacacaaggtgtacgcatgcgaggtgacacaccaaggtctttcatctcctgtaactaagagctttaaccggggagaatgtggtggtgggggcagcgggggcggaggtagtggaggcggcggtagtgaaccaaagagtagtgacaaaactcacacgtgcccaccgtgcccagcacctgaactcctggggggaccgtcagtcttcctcttccccccaaaacccaaggacaccctcatgatctcccggacccctgaggtcacatgcgtggtggtggacgtgagccacgaagaccctgaggtcaagttcaactggtacgtggacggcgtggaggtgcataatgccaagacaaagccgcgggaggagcagtacaacagcacgtaccgtgtggtcagcgtcctcaccgtcctgcaccaggactggctgaatggcaaggagtacaagtgcaaggtctccaacaaagccctcccagcccccatcgagaaaaccatctccaaagccaaagggcagccccgagaaccacaggtgtacaccctgcccccatgccgggaggagatgaccaagaaccaggtcagcctgtggtgcctggtcaaaggcttctatcccagcgacatcgccgtggagtgggagagcaatgggcagccggagaacaactacaagaccacgcctcccgtgctggactccgacggctccttcttcctctacagcaagctcaccgtggacaagagcaggtggcagcaggggaacgtcttctcatgctccgtgatgcatgaggctctgcacaaccactacacgcagaagagcctctccctgtctccgggtaaa

SEQ ID NO: 654 - DNA, 1344 bp, synthetic construct
  source 1..1344: mol_type = other DNA
  misc_feature 1..1344: note = nucleotide sequence coding HC of 33-3
caagtccaacttcagcagcctggagctgaggtagtgaaacccggcgcatctgtaaaaatgagctgcaaagcatcaggttacacatttacatcctactacatccattggatcaagcaaacaccaggccaatgtcttgagtgggttggcgtcatttacccaggaaacgatgatatatcttacaatcagaaatttcaagggaaagccacacttacagccgacaagagttccacaactgcatatatgcaactctcctccctgacatctgaagacagtgccgtatactattgtgctcgtgaagtcaggctcagatactttgacgtgtggggtcaaggcacaaccgtcaccgtcagtagcgctagcaccaaaggacctagtgtttttcctcttgccccttcctcaaagtctacctctggggggacagccgctctgggctgcctggtcaaggattatttcccagagcctgtcactgtcagttggaactctggagccttgacttctggtgttcatacatttcctgctgtccttcaaagcagcggcttgtactcattgtcttctgttgtgacagtaccctcaagcagcctcggcactcagacatacatctgcaatgtcaaccacaaaccctcaaatacaaaggtagataaaaaagtcgaaccaaagtcttgtgacaaaactcacacgtgcccaccgtgcccagcacctgaactcctggggggaccgtcagtcttcctcttccccccaaaacccaaggacaccctcatgatctcccggacccctgaggtcacatgcgtggtggtggacgtgagccacgaagaccctgaggtcaagttcaactggtacgtggacggcgtggaggtgcataatgccaagacaaagccgcgggaggagcagtacaacagcacgtaccgtgtggtcagcgtcctcaccgtcctgcaccaggactggctgaatggcaaggagtacaagtgcaaggtctccaacaaagccctcccagcccccatcgagaaaaccatctccaaagccaaagggcagccccgagaaccacaggtgtacaccctgcccccatgccgggaggagatgaccaagaaccaggtcagcctgtggtgcctggtcaaaggcttctatcccagcgacatcgccgtggagtgggagagcaatgggcagccggagaacaactacaagaccacgcctcccgtgctggactccgacggctccttcttcctctacagcaagctcaccgtggacaagagcaggtggcagcaggggaacgtcttctcatgctccgtgatgcatgaggctctgcacaaccactacacgcagaagagcctctccctgtctccgggtaaa

SEQ ID NO: 655 - DNA, 1398 bp, synthetic construct
  source 1..1398: mol_type = other DNA
  misc_feature 1..1398: note = nucleotide seqeunce coding LC of 33-3
gagatagtcctcacccaatcaccaggtagtctggctgttagcccaggtgagcgagttactatgtcttgcaagtcctctcaatctgtgttcttttcatcaagtcagaagaattatcttgcctggtatcagcagattcctggtcaatctccccgactgcttatttactgggcttcaactcgggagtcaggggttcccgaccgattcacagggtctgggtcaggaactgactttacccttactatcagctctgtgcagcctgaagacctcgcaatatattattgtcatcagtacctctcttctcgcacttttggatgtggcaccaaattggagattaagcgtacggtggcagctcccagcgtttttatctttcccccatccgacgagcagctcaagagtggcactgcctctgtagtttgtttgctgaataacttctatccacgtgaagcaaaagtacagtggaaggtcgataatgcccttcagagcggtaacagccaagaaagtgttaccgagcaagattccaaagattccacttacagtctgtccagcacattgacactgagtaaggctgattacgaaaaacacaaggtgtacgcatgcgaggtgacacaccaaggtctttcatctcctgtaactaagagctttaaccggggagaatgtggtggtgggggcagcgggggcggaggtagtggaggcggcggtagtgaaccaaagagtagtgacaaaactcacacgtgcccaccgtgcccagcacctgaactcctggggggaccgtcagtcttcctcttccccccaaaacccaaggacaccctcatgatctcccggacccctgaggtcacatgcgtggtggtggacgtgagccacgaagaccctgaggtcaagttcaactggtacgtggacggcgtggaggtgcataatgccaagacaaagccgcgggaggagcagtacaacagcacgtaccgtgtggtcagcgtcctcaccgtcctgcaccaggactggctgaatggcaaggagtacaagtgcaaggtctccaacaaagccctcccagcccccatcgagaaaaccatctccaaagccaaagggcagccccgagaaccacaggtgtacaccctgcccccatgccgggaggagatgaccaagaaccaggtcagcctgtggtgcctggtcaaaggcttctatcccagcgacatcgccgtggagtgggagagcaatgggcagccggagaacaactacaagaccacgcctcccgtgctggactccgacggctccttcttcctctacagcaagctcaccgtggacaagagcaggtggcagcaggggaacgtcttctcatgctccgtgatgcatgaggctctgcacaaccactacacgcagaagagcctctccctgtctccgggtaaa

SEQ ID NO: 656 - DNA, 1725 bp, synthetic construct
  source 1..1725: mol_type = other DNA
  misc_feature 1..1725: note = nucleotide seqeunce coding HC of 33-4
gaggttcagttggttcagtcaggagcagaggtcaaaaaacctggaagctctgtcaaagttagttgtaaggccagtggatacaccataaccgattcaaatatacattgggttaggcaagcaccaggacagtccttggaatggatcgggtacatctatccatataatgggggcaccgattacaaccaaaagtttaagaatcgcgccacactcactgttgataatccaaccaatacagcatacatggagttgagcagtcttcggtccgaggacactgctttttactattgtgtgaacggtaacccatggttggcctattggggccaaggtacacttgtaacagtttcatccgctagcaccaaaggacctagtgtttttcctcttgcccctcaggtacagcttgtgcaatctggagctgaggtcaaaaaaccaggaagttctgtaaaggtgtcttgtaaggcatctggttacacatttaccgattacaacatgcattgggtacgtcaagcccctggccagtgcctggaatggatcggatatatatacccctacaacggtggaacaggttacaaccaaaaattcaaaagcaaggctactatcactgccgacgagagcactaacaccgcttacatggaactgtcttccttgcgttcagaagacactgccgtgtattattgtgctcgggggcgacccgcaatggactattggggccaaggtacattggtgactgtcagttccgctagcaccaaaggacctagtgtttttcctcttgccccttcctcaaagtctacctctggggggacagccgctctgggctgcctggtcaaggattatttcccagagcctgtcactgtcagttggaactctggagccttgacttctggtgttcatacatttcctgctgtccttcaaagcagcggcttgtactcattgtcttctgttgtgacagtaccctcaagcagcctcggcactcagacatacatctgcaatgtcaaccacaaaccctcaaatacaaaggtagataaaaaagtcgaaccaaagtcttgtgacaaaactcacacgtgcccaccgtgcccagcacctgaactcctggggggaccgtcagtcttcctcttccccccaaaacccaaggacaccctcatgatctcccggacccctgaggtcacatgcgtggtggtggacgtgagccacgaagaccctgaggtcaagttcaactggtacgtggacggcgtggaggtgcataatgccaagacaaagccgcgggaggagcagtacaacagcacgtaccgtgtggtcagcgtcctcaccgtcctgcaccaggactggctgaatggcaaggagtacaagtgcaaggtctccaacaaagccctcccagcccccatcgagaaaaccatctccaaagccaaagggcagccccgagaaccacaggtgtacaccctgcccccatgccgggaggagatgaccaagaaccaggtcagcctgtggtgcctggtcaaaggcttctatcccagcgacatcgccgtggagtgggagagcaatgggcagccggagaacaactacaagaccacgcctcccgtgctggactccgacggctccttcttcctctacagcaagctcaccgtggacaagagcaggtggcagcaggggaacgtcttctcatgctccgtgatgcatgaggctctgcacaaccactacacgcagaagagcctctccctgtctccgggtaaa

SEQ ID NO: 657 - DNA, 1767 bp, synthetic construct
  source 1..1767: mol_type = other DNA
  misc_feature 1..1767: note = nucleotide seqeunce coding LC of 33-4
gatatacaactgactcagagtcccagcactctcagtgcaagtgtaggcgatagagtaactataacctgtcgcgcctcagaatctcttgataattatgggatccgatttcttacttggtttcagcaaaagcctggtaaagctcctaaattgctcatgtatgccgccagtaatcagggttcaggagttcctagtcgtttctctgggtcaggaagcggcacagaatttacccttacaatttccagcctccagcccgacgatttcgccacttactattgccaacaaactaaagaggttccttggagttttgggcaaggcaccaaggtagaagtaaaacgtacggtggccgctccctccgtttttatctttcccccagacatccaaatgacacagtcccctagctcactttcagcaagcgtgggggaccgagttactatcacatgccgcgcaagtgagtctgtggacaactatggaatatcattcatgaactggttccagcagaaacctgggaaagcacccaagctgcttatctacgcagcaagtaatcagggtagtggcgtcccttctcgattcagtgggagcggtagcggcaccgacttcacccttaccatctcatcacttcaacccgatgattttgctacctactattgccagcaatccaaggaagttccttggaccttcgggtgtgggacaaaggtagagattaaacgtacggtggcagctcccagcgtttttatctttcccccatccgacgagcagctcaagagtggcactgcctctgtagtttgtttgctgaataacttctatccacgtgaagcaaaagtacagtggaaggtcgataatgcccttcagagcggtaacagccaagaaagtgttaccgagcaagattccaaagattccacttacagtctgtccagcacattgacactgagtaaggctgattacgaaaaacacaaggtgtacgcatgcgaggtgacacaccaaggtctttcatctcctgtaactaagagctttaaccggggagaatgtggtggtgggggcagcgggggcggaggtagtggaggcggcggtagtgaaccaaagagtagtgacaaaactcacacgtgcccaccgtgcccagcacctgaactcctggggggaccgtcagtcttcctcttccccccaaaacccaaggacaccctcatgatctcccggacccctgaggtcacatgcgtggtggtggacgtgagccacgaagaccctgaggtcaagttcaactggtacgtggacggcgtggaggtgcataatgccaagacaaagccgcgggaggagcagtacaacagcacgtaccgtgtggtcagcgtcctcaccgtcctgcaccaggactggctgaatggcaaggagtacaagtgcaaggtctccaacaaagccctcccagcccccatcgagaaaaccatctccaaagccaaagggcagccccgagaaccacaggtgtacaccctgcccccatgccgggaggagatgaccaagaaccaggtcagcctgtggtgcctggtcaaaggcttctatcccagcgacatcgccgtggagtgggagagcaatgggcagccggagaacaactacaagaccacgcctcccgtgctggactccgacggctccttcttcctctacagcaagctcaccgtggacaagagcaggtggcagcaggggaacgtcttctcatgctccgtgatgcatgaggctctgcacaaccactacacgcagaagagcctctccctgtctccgggtaaa

SEQ ID NO: 658 - DNA, 1731 bp, synthetic construct
  source 1..1731: mol_type = other DNA
  misc_feature 1..1731: note = nucleotide seqeunce coding HC of 33-5
caagtccaacttcagcagcctggagctgaggtagtgaaacccggcgcatctgtaaaaatgagctgcaaagcatcaggttacacatttacatcctactacatccattggatcaagcaaacaccaggccaaggtcttgagtgggttggcgtcatttacccaggaaacgatgatatatcttacaatcagaaatttcaagggaaagccacacttacagccgacaagagttccacaactgcatatatgcaactctcctccctgacatctgaagacagtgccgtatactattgtgctcgtgaagtcaggctcagatactttgacgtgtggggtcaaggcacaaccgtcaccgtcagtagcgctagcaccaaaggacctagtgtttttcctcttgcccctcaggtacagcttgtgcaatctggagctgaggtcaaaaaaccaggaagttctgtaaaggtgtcttgtaaggcatctggttacacatttaccgattacaacatgcattgggtacgtcaagcccctggccagtgcctggaatggatcggatatatatacccctacaacggtggaacaggttacaaccaaaaattcaaaagcaaggctactatcactgccgacgagagcactaacaccgcttacatggaactgtcttccttgcgttcagaagacactgccgtgtattattgtgctcgggggcgacccgcaatggactattggggccaaggtacattggtgactgtcagttccgctagcaccaaaggacctagtgtttttcctcttgccccttcctcaaagtctacctctggggggacagccgctctgggctgcctggtcaaggattatttcccagagcctgtcactgtcagttggaactctggagccttgacttctggtgttcatacatttcctgctgtccttcaaagcagcggcttgtactcattgtcttctgttgtgacagtaccctcaagcagcctcggcactcagacatacatctgcaatgtcaaccacaaaccctcaaatacaaaggtagataaaaaagtcgaaccaaagtcttgtgacaaaactcacacgtgcccaccgtgcccagcacctgaactcctggggggaccgtcagtcttcctcttccccccaaaacccaaggacaccctcatgatctcccggacccctgaggtcacatgcgtggtggtggacgtgagccacgaagaccctgaggtcaagttcaactggtacgtggacggcgtggaggtgcataatgccaagacaaagccgcgggaggagcagtacaacagcacgtaccgtgtggtcagcgtcctcaccgtcctgcaccaggactggctgaatggcaaggagtacaagtgcaaggtctccaacaaagccctcccagcccccatcgagaaaaccatctccaaagccaaagggcagccccgagaaccacaggtgtacaccctgcccccatgccgggaggagatgaccaagaaccaggtcagcctgtggtgcctggtcaaaggcttctatcccagcgacatcgccgtggagtgggagagcaatgggcagccggagaacaactacaagaccacgcctcccgtgctggactccgacggctccttcttcctctacagcaagctcaccgtggacaagagcaggtggcagcaggggaacgtcttctcatgctccgtgatgcatgaggctctgcacaaccactacacgcagaagagcctctccctgtctccgggtaaa

SEQ ID NO: 659 - DNA, 1770 bp, synthetic construct
  source 1..1770: mol_type = other DNA
  misc_feature 1..1770: note = nucleotide seqeunce coding LC of 33-5
gagatagtcctcacccaatcaccaggtagtctggctgttagcccaggtgagcgagttactatgtcttgcaagtcctctcaatctgtgttcttttcatcaagtcagaagaattatcttgcctggtatcagcagattcctggtcaatctccccgactgcttatttactgggcttcaactcgggagtcaggggttcccgaccgattcacagggtctgggtcaggaactgactttacccttactatcagctctgtgcagcctgaagacctcgcaatatattattgtcatcagtacctctcttctcgcacttttggacagggcaccaaattggagattaagcgtacggtggccgctccctccgtttttatctttcccccagacatccaaatgacacagtcccctagctcactttcagcaagcgtgggggaccgagttactatcacatgccgcgcaagtgagtctgtggacaactatggaatatcattcatgaactggttccagcagaaacctgggaaagcacccaagctgcttatctacgcagcaagtaatcagggtagtggcgtcccttctcgattcagtgggagcggtagcggcaccgacttcacccttaccatctcatcacttcaacccgatgattttgctacctactattgccagcaatccaaggaagttccttggaccttcgggtgtgggacaaaggtagagattaaacgtacggtggcagctcccagcgtttttatctttcccccatccgacgagcagctcaagagtggcactgcctctgtagtttgtttgctgaataacttctatccacgtgaagcaaaagtacagtggaaggtcgataatgcccttcagagcggtaacagccaagaaagtgttaccgagcaagattccaaagattccacttacagtctgtccagcacattgacactgagtaaggctgattacgaaaaacacaaggtgtacgcatgcgaggtgacacaccaaggtctttcatctcctgtaactaagagctttaaccggggagaatgtggtggtgggggcagcgggggcggaggtagtggaggcggcggtagtgaaccaaagagtagtgacaaaactcacacgtgcccaccgtgcccagcacctgaactcctggggggaccgtcagtcttcctcttccccccaaaacccaaggacaccctcatgatctcccggacccctgaggtcacatgcgtggtggtggacgtgagccacgaagaccctgaggtcaagttcaactggtacgtggacggcgtggaggtgcataatgccaagacaaagccgcgggaggagcagtacaacagcacgtaccgtgtggtcagcgtcctcaccgtcctgcaccaggactggctgaatggcaaggagtacaagtgcaaggtctccaacaaagccctcccagcccccatcgagaaaaccatctccaaagccaaagggcagccccgagaaccacaggtgtacaccctgcccccatgccgggaggagatgaccaagaaccaggtcagcctgtggtgcctggtcaaaggcttctatcccagcgacatcgccgtggagtgggagagcaatgggcagccggagaacaactacaagaccacgcctcccgtgctggactccgacggctccttcttcctctacagcaagctcaccgtggacaagagcaggtggcagcaggggaacgtcttctcatgctccgtgatgcatgaggctctgcacaaccactacacgcagaagagcctctccctgtctccgggtaaa

SEQ ID NO: 660 - DNA, 1725 bp, synthetic construct
  source 1..1725: mol_type = other DNA
  misc_feature 1..1725: note = nucleotide sequence coding HC of 33-6
caggtacagcttgtgcaatctggagctgaggtcaaaaaaccaggaagttctgtaaaggtgtcttgtaaggcatctggttacacatttaccgattacaacatgcattgggtacgtcaagcccctggccagggcctggaatggatcggatatatatacccctacaacggtggaacaggttacaaccaaaaattcaaaagcaaggctactatcactgccgacgagagcactaacaccgcttacatggaactgtcttccttgcgttcagaagacactgccgtgtattattgtgctcgggggcgacccgcaatggactattggggccaaggtacattggtgactgtcagttccgctagcaccaaaggacctagtgtttttcctcttgcccctgaggttcagttggttcagtcaggagcagaggtcaaaaaacctggaagctctgtcaaagttagttgtaaggccagtggatacaccataaccgattcaaatatacattgggttaggcaagcaccaggacagtgcttggaatggatcgggtacatctatccatataatgggggcaccgattacaaccaaaagtttaagaatcgcgccacactcactgttgataatccaaccaatacagcatacatggagttgagcagtcttcggtccgaggacactgctttttactattgtgtgaacggtaacccatggttggcctattggggccaaggtacacttgtaacagtttcatctgctagcaccaaaggacctagtgtttttcctcttgccccttcctcaaagtctacctctggggggacagccgctctgggctgcctggtcaaggattatttcccagagcctgtcactgtcagttggaactctggagccttgacttctggtgttcatacatttcctgctgtccttcaaagcagcggcttgtactcattgtcttctgttgtgacagtaccctcaagcagcctcggcactcagacatacatctgcaatgtcaaccacaaaccctcaaatacaaaggtagataaaaaagtcgaaccaaagtcttgtgacaaaactcacacgtgcccaccgtgcccagcacctgaactcctggggggaccgtcagtcttcctcttccccccaaaacccaaggacaccctcatgatctcccggacccctgaggtcacatgcgtggtggtggacgtgagccacgaagaccctgaggtcaagttcaactggtacgtggacggcgtggaggtgcataatgccaagacaaagccgcgggaggagcagtacaacagcacgtaccgtgtggtcagcgtcctcaccgtcctgcaccaggactggctgaatggcaaggagtacaagtgcaaggtctccaacaaagccctcccagcccccatcgagaaaaccatctccaaagccaaagggcagccccgagaaccacaggtgtacaccctgcccccatgccgggaggagatgaccaagaaccaggtcagcctgtggtgcctggtcaaaggcttctatcccagcgacatcgccgtggagtgggagagcaatgggcagccggagaacaactacaagaccacgcctcccgtgctggactccgacggctccttcttcctctacagcaagctcaccgtggacaagagcaggtggcagcaggggaacgtcttctcatgctccgtgatgcatgaggctctgcacaaccactacacgcagaagagcctctccctgtctccgggtaaa

SEQ ID NO: 661 - DNA, 1395 bp, synthetic construct
  source 1..1395: mol_type = other DNA
  misc_feature 1..1395: note = nucleotide sequence coding LC of 33-6
gacatccaaatgacacagtcccctagctcactttcagcaagcgtgggggaccgagttactatcacatgccgcgcaagtgagtctgtggacaactatggaatatcattcatgaactggttccagcagaaacctgggaaagcacccaagctgcttatctacgcagcaagtaatcagggtagtggcgtcccttctcgattcagtgggagcggtagcggcaccgacttcacccttaccatctcatcacttcaacccgatgattttgctacctactattgccagcaatccaaggaagttccttggaccttcgggcaagggacaaaggtagagattaaacgtacggtggcagctcccagcgtttttatctttcccccatccgacgagcagctcaagagtggcactgcctctgtagtttgtttgctgaataacttctatccacgtgaagcaaaagtacagtggaaggtcgataatgcccttcagagcggtaacagccaagaaagtgttaccgagcaagattccaaagattccacttacagtctgtccagcacattgacactgagtaaggctgattacgaaaaacacaaggtgtacgcatgcgaggtgacacaccaaggtctttcatctcctgtaactaagagctttaaccggggagaatgtggtggtgggggcagcgggggcggaggtagtggaggcggcggtagtgaaccaaagagtagtgacaaaactcacacgtgcccaccgtgcccagcacctgaactcctggggggaccgtcagtcttcctcttccccccaaaacccaaggacaccctcatgatctcccggacccctgaggtcacatgcgtggtggtggacgtgagccacgaagaccctgaggtcaagttcaactggtacgtggacggcgtggaggtgcataatgccaagacaaagccgcgggaggagcagtacaacagcacgtaccgtgtggtcagcgtcctcaccgtcctgcaccaggactggctgaatggcaaggagtacaagtgcaaggtctccaacaaagccctcccagcccccatcgagaaaaccatctccaaagccaaagggcagccccgagaaccacaggtgtacaccctgcccccatgccgggaggagatgaccaagaaccaggtcagcctgtggtgcctggtcaaaggcttctatcccagcgacatcgccgtggagtgggagagcaatgggcagccggagaacaactacaagaccacgcctcccgtgctggactccgacggctccttcttcctctacagcaagctcaccgtggacaagagcaggtggcagcaggggaacgtcttctcatgctccgtgatgcatgaggctctgcacaaccactacacgcagaagagcctctccctgtctccgggtaaa

SEQ ID NO: 662 - DNA, 1731 bp, synthetic construct
  source 1..1731: mol_type = other DNA
  misc_feature 1..1731: note = nucleotide sequence coding HC of 33-7
caggtacagcttgtgcaatctggagctgaggtcaaaaaaccaggaagttctgtaaaggtgtcttgtaaggcatctggttacacatttaccgattacaacatgcattgggtacgtcaagcccctggccagggcctggaatggatcggatatatatacccctacaacggtggaacaggttacaaccaaaaattcaaaagcaaggctactatcactgccgacgagagcactaacaccgcttacatggaactgtcttccttgcgttcagaagacactgccgtgtattattgtgctcgggggcgacccgcaatggactattggggccaaggtacattggtgactgtcagttccgctagcaccaaaggacctagtgtttttcctcttgcccctcaagtccaacttcagcagcctggagctgaggtagtgaaacccggcgcatctgtaaaaatgagctgcaaagcatcaggttacacatttacatcctactacatccattggatcaagcaaacaccaggccaatgtcttgagtgggttggcgtcatttacccaggaaacgatgatatatcttacaatcagaaatttcaagggaaagccacacttacagccgacaagagttccacaactgcatatatgcaactctcctccctgacatctgaagacagtgccgtatactattgtgctcgtgaagtcaggctcagatactttgacgtgtggggtcaaggcacaaccgtcaccgtcagtagcgctagcaccaaaggacctagtgtttttcctcttgccccttcctcaaagtctacctctggggggacagccgctctgggctgcctggtcaaggattatttcccagagcctgtcactgtcagttggaactctggagccttgacttctggtgttcatacatttcctgctgtccttcaaagcagcggcttgtactcattgtcttctgttgtgacagtaccctcaagcagcctcggcactcagacatacatctgcaatgtcaaccacaaaccctcaaatacaaaggtagataaaaaagtcgaaccaaagtcttgtgacaaaactcacacgtgcccaccgtgcccagcacctgaactcctggggggaccgtcagtcttcctcttccccccaaaacccaaggacaccctcatgatctcccggacccctgaggtcacatgcgtggtggtggacgtgagccacgaagaccctgaggtcaagttcaactggtacgtggacggcgtggaggtgcataatgccaagacaaagccgcgggaggagcagtacaacagcacgtaccgtgtggtcagcgtcctcaccgtcctgcaccaggactggctgaatggcaaggagtacaagtgcaaggtctccaacaaagccctcccagcccccatcgagaaaaccatctccaaagccaaagggcagccccgagaaccacaggtgtacaccctgcccccatgccgggaggagatgaccaagaaccaggtcagcctgtggtgcctggtcaaaggcttctatcccagcgacatcgccgtggagtgggagagcaatgggcagccggagaacaactacaagaccacgcctcccgtgctggactccgacggctccttcttcctctacagcaagctcaccgtggacaagagcaggtggcagcaggggaacgtcttctcatgctccgtgatgcatgaggctctgcacaaccactacacgcagaagagcctctccctgtctccgggtaaa

SEQ ID NO: 663 - DNA, 1770 bp, synthetic construct
  source 1..1770: mol_type = other DNA
  misc_feature 1..1770: note = nucleotide sequence coding LC of 33-7
gacatccaaatgacacagtcccctagctcactttcagcaagcgtgggggaccgagttactatcacatgccgcgcaagtgagtctgtggacaactatggaatatcattcatgaactggttccagcagaaacctgggaaagcacccaagctgcttatctacgcagcaagtaatcagggtagtggcgtcccttctcgattcagtgggagcggtagcggcaccgacttcacccttaccatctcatcacttcaacccgatgattttgctacctactattgccagcaatccaaggaagttccttggaccttcgggcaagggacaaaggtagagattaaacgtacggtggccgctccctccgtttttatctttcccccagagatagtcctcacccaatcaccaggtagtctggctgttagcccaggtgagcgagttactatgtcttgcaagtcctctcaatctgtgttcttttcatcaagtcagaagaattatcttgcctggtatcagcagattcctggtcaatctccccgactgcttatttactgggcttcaactcgggagtcaggggttcccgaccgattcacagggtctgggtcaggaactgactttacccttactatcagctctgtgcagcctgaagacctcgcaatatattattgtcatcagtacctctcttctcgcacttttggatgtggcaccaaattggagattaagcgtacggtggcagctcccagcgtttttatctttcccccatccgacgagcagctcaagagtggcactgcctctgtagtttgtttgctgaataacttctatccacgtgaagcaaaagtacagtggaaggtcgataatgcccttcagagcggtaacagccaagaaagtgttaccgagcaagattccaaagattccacttacagtctgtccagcacattgacactgagtaaggctgattacgaaaaacacaaggtgtacgcatgcgaggtgacacaccaaggtctttcatctcctgtaactaagagctttaaccggggagaatgtggtggtgggggcagcgggggcggaggtagtggaggcggcggtagtgaaccaaagagtagtgacaaaactcacacgtgcccaccgtgcccagcacctgaactcctggggggaccgtcagtcttcctcttccccccaaaacccaaggacaccctcatgatctcccggacccctgaggtcacatgcgtggtggtggacgtgagccacgaagaccctgaggtcaagttcaactggtacgtggacggcgtggaggtgcataatgccaagacaaagccgcgggaggagcagtacaacagcacgtaccgtgtggtcagcgtcctcaccgtcctgcaccaggactggctgaatggcaaggagtacaagtgcaaggtctccaacaaagccctcccagcccccatcgagaaaaccatctccaaagccaaagggcagccccgagaaccacaggtgtacaccctgcccccatgccgggaggagatgaccaagaaccaggtcagcctgtggtgcctggtcaaaggcttctatcccagcgacatcgccgtggagtgggagagcaatgggcagccggagaacaactacaagaccacgcctcccgtgctggactccgacggctccttcttcctctacagcaagctcaccgtggacaagagcaggtggcagcaggggaacgtcttctcatgctccgtgatgcatgaggctctgcacaaccactacacgcagaagagcctctccctgtctccgggtaaa

SEQ ID NO: 664 - protein, 116 aa, synthetic construct
  REGION 1..116: note = 33-1-VH or 33-6-VH2
EVQLVQSGAEVKKPGSSVKVSCKASGYTITDSNIHWVRQAPGQCLEWIGYIYPYNGGTDYNQKFKNRATLTVDNPTNTAYMELSSLRSEDTAFYYCVNGNPWLAYWGQGTLVTVSS

SEQ ID NO: 665 - protein, 111 aa, synthetic construct
  REGION 1..111: note = 33-1-VL or 33-6-VL2
DIQLTQSPSTLSASVGDRVTITCRASESLDNYGIRFLTWFQQKPGKAPKLLMYAASNQGSGVPSRFSGSGSGTEFTLTISSLQPDDFATYYCQQTKEVPWSFGCGTKVEVK

SEQ ID NO: 666 - protein, 116 aa, synthetic construct
  REGION 1..116: note = 33-2-VH , 33-4-VH2 or 33-5-VH2
QVQLVQSGAEVKKPGSSVKVSCKASGYTFTDYNMHWVRQAPGQCLEWIGYIYPYNGGTGYNQKFKSKATITADESTNTAYMELSSLRSEDTAVYYCARGRPAMDYWGQGTLVTVSS

SEQ ID NO: 667 - protein, 111 aa, synthetic construct
  REGION 1..111: note = 33-2-VL, 33-4-VL2 or 33-5-VL2
DIQMTQSPSSLSASVGDRVTITCRASESVDNYGISFMNWFQQKPGKAPKLLIYAASNQGSGVPSRFSGSGSGTDFTLTISSLQPDDFATYYCQQSKEVPWTFGCGTKVEIK

SEQ ID NO: 668 - protein, 118 aa, synthetic construct
  REGION 1..118: note = 33-3-VH or 33-7-VH2
QVQLQQPGAEVVKPGASVKMSCKASGYTFTSYYIHWIKQTPGQCLEWVGVIYPGNDDISYNQKFQGKATLTADKSSTTAYMQLSSLTSEDSAVYYCAREVRLRYFDVWGQGTTVTVSS

SEQ ID NO: 669 - protein, 112 aa, synthetic construct
  REGION 1..112: note = 33-3-VL or 33-7-VL2
EIVLTQSPGSLAVSPGERVTMSCKSSQSVFFSSSQKNYLAWYQQIPGQSPRLLIYWASTRESGVPDRFTGSGSGTDFTLTISSVQPEDLAIYYCHQYLSSRTFGCGTKLEIK

SEQ ID NO: 670 - protein, 116 aa, synthetic construct [sequence omitted]

SEQ ID NO: 671 - protein, 111 aa, synthetic construct [sequence omitted]

SEQ ID NO: 672 - protein, 118 aa, synthetic construct
  REGION 1..118: note = 33-5-VH1
QVQLQQPGAEVVKPGASVKMSCKASGYTFTSYYIHWIKQTPGQGLEWVGVIYPGNDDISYNQKFQGKATLTADKSSTTAYMQLSSLTSEDSAVYYCAREVRLRYFDVWGQGTTVTVSS

SEQ ID NO: 673 - protein, 112 aa, synthetic construct
  REGION 1..112: note = 33-5-VL1
EIVLTQSPGSLAVSPGERVTMSCKSSQSVFFSSSQKNYLAWYQQIPGQSPRLLIYWASTRESGVPDRFTGSGSGTDFTLTISSVQPEDLAIYYCHQYLSSRTFGQGTKLEIK

SEQ ID NO: 674 - protein, 116 aa, synthetic construct
  REGION 1..116: note = 33-6-VH1 or 33-7-VH1
QVQLVQSGAEVKKPGSSVKVSCKASGYTFTDYNMHWVRQAPGQGLEWIGYIYPYNGGTGYNQKFKSKATITADESTNTAYMELSSLRSEDTAVYYCARGRPAMDYWGQGTLVTVSS

SEQ ID NO: 675 - protein, 111 aa, synthetic construct
  REGION 1..111: note = 33-6-VL1 or 33-7-VL1
DIQMTQSPSSLSASVGDRVTITCRASESVDNYGISFMNWFQQKPGKAPKLLIYAASNQGSGVPSRFSGSGSGTDFTLTISSLQPDDFATYYCQQSKEVPWTFGQGTKVEIK

SEQ ID NO: 676 - DNA, 348 bp, synthetic construct
  source 1..348: mol_type = other DNA
  misc_feature 1..348: note = nucleotide sequence coding VH of 33-1 or VH2 of 33-6
gaggttcagttggttcagtcaggagcagaggtcaaaaaacctggaagctctgtcaaagttagttgtaaggccagtggatacaccataaccgattcaaatatacattgggttaggcaagcaccaggacagtgcttggaatggatcgggtacatctatccatataatgggggcaccgattacaaccaaaagtttaagaatcgcgccacactcactgttgataatccaaccaatacagcatacatggagttgagcagtcttcggtccgaggacactgctttttactattgtgtgaacggtaacccatggttggcctattggggccaaggtacacttgtaacagtttcatct

SEQ ID NO: 677 - DNA, 333 bp, synthetic construct
  source 1..333: mol_type = other DNA
  misc_feature 1..333: note = nucleotide sequence coding VL of 33-1 or VL2 of 33-6
gatatacaactgactcagagtcccagcactctcagtgcaagtgtaggcgatagagtaactataacctgtcgcgcctcagaatctcttgataattatgggatccgatttcttacttggtttcagcaaaagcctggtaaagctcctaaattgctcatgtatgccgccagtaatcagggttcaggagttcctagtcgtttctctgggtcaggaagcggcacagaatttacccttacaatttccagcctccagcccgacgatttcgccacttactattgccaacaaactaaagaggttccttggagttttgggtgtggcaccaaggtagaagtaaaa

SEQ ID NO: 678 - protein, 348 aa, synthetic construct
  REGION 1..348: note = nucleotide sequence coding VH of 33-2, VH2 of 33-4 or VH2 of 33-5
CAGGTACAGCTTGTGCAATCTGGAGCTGAGGTCAAAAAACCAGGAAGTTCTGTAAAGGTGTCTTGTAAGGCATCTGGTTACACATTTACCGATTACAACATGCATTGGGTACGTCAAGCCCCTGGCCAGTGCCTGGAATGGATCGGATATATATACCCCTACAACGGTGGAACAGGTTACAACCAAAAATTCAAAAGCAAGGCTACTATCACTGCCGACGAGAGCACTAACACCGCTTACATGGAACTGTCTTCCTTGCGTTCAGAAGACACTGCCGTGTATTATTGTGCTCGGGGGCGACCCGCAATGGACTATTGGGGCCAAGGTACATTGGTGACTGTCAGTTCC

SEQ ID NO: 679 - DNA, 333 bp, synthetic construct
  source 1..333: mol_type = other DNA
  misc_feature 1..333: note = nucleotide sequence coding VL of 33-2, VL2 of 33-4 or VL2 of 33-5
gacatccaaatgacacagtcccctagctcactttcagcaagcgtgggggaccgagttactatcacatgccgcgcaagtgagtctgtggacaactatggaatatcattcatgaactggttccagcagaaacctgggaaagcacccaagctgcttatctacgcagcaagtaatcagggtagtggcgtcccttctcgattcagtgggagcggtagcggcaccgacttcacccttaccatctcatcacttcaacccgatgattttgctacctactattgccagcaatccaaggaagttccttggaccttcgggtgtgggacaaaggtagagattaaa

SEQ ID NO: 680 - DNA, 354 bp, synthetic construct
  source 1..354: mol_type = other DNA
  misc_feature 1..354: note = nucleotide sequenc coding VH of 33-3 or VH2 of 33-7
caagtccaacttcagcagcctggagctgaggtagtgaaacccggcgcatctgtaaaaatgagctgcaaagcatcaggttacacatttacatcctactacatccattggatcaagcaaacaccaggccaatgtcttgagtgggttggcgtcatttacccaggaaacgatgatatatcttacaatcagaaatttcaagggaaagccacacttacagccgacaagagttccacaactgcatatatgcaactctcctccctgacatctgaagacagtgccgtatactattgtgctcgtgaagtcaggctcagatactttgacgtgtggggtcaaggcacaaccgtcaccgtcagtagc

SEQ ID NO: 681 - DNA, 336 bp, synthetic construct
  source 1..336: mol_type = other DNA
  misc_feature 1..336: note = nucleotide sequenc coding VL of 33-3 or VL2 of 33-7
gagatagtcctcacccaatcaccaggtagtctggctgttagcccaggtgagcgagttactatgtcttgcaagtcctctcaatctgtgttcttttcatcaagtcagaagaattatcttgcctggtatcagcagattcctggtcaatctccccgactgcttatttactgggcttcaactcgggagtcaggggttcccgaccgattcacagggtctgggtcaggaactgactttacccttactatcagctctgtgcagcctgaagacctcgcaatatattattgtcatcagtacctctcttctcgcacttttggatgtggcaccaaattggagattaag

SEQ ID NO: 682 - DNA, 348 bp, synthetic construct
  source 1..348: mol_type = other DNA
  misc_feature 1..348: note = nucleotide sequence coding VH1 of 33-4
gaggttcagttggttcagtcaggagcagaggtcaaaaaacctggaagctctgtcaaagttagttgtaaggccagtggatacaccataaccgattcaaatatacattgggttaggcaagcaccaggacagtccttggaatggatcgggtacatctatccatataatgggggcaccgattacaaccaaaagtttaagaatcgcgccacactcactgttgataatccaaccaatacagcatacatggagttgagcagtcttcggtccgaggacactgctttttactattgtgtgaacggtaacccatggttggcctattggggccaaggtacacttgtaacagtttcatcc

SEQ ID NO: 683 - DNA, 333 bp, synthetic construct
  source 1..333: mol_type = other DNA
  misc_feature 1..333: note = nucleotide sequence coding VL1 of 33-4
gatatacaactgactcagagtcccagcactctcagtgcaagtgtaggcgatagagtaactataacctgtcgcgcctcagaatctcttgataattatgggatccgatttcttacttggtttcagcaaaagcctggtaaagctcctaaattgctcatgtatgccgccagtaatcagggttcaggagttcctagtcgtttctctgggtcaggaagcggcacagaatttacccttacaatttccagcctccagcccgacgatttcgccacttactattgccaacaaactaaagaggttccttggagttttgggcaaggcaccaaggtagaagtaaaa

SEQ ID NO: 684 - DNA, 354 bp, synthetic construct
  source 1..354: mol_type = other DNA
  misc_feature 1..354: note = nucleotide sequence coding VH1 of 33-5
caagtccaacttcagcagcctggagctgaggtagtgaaacccggcgcatctgtaaaaatgagctgcaaagcatcaggttacacatttacatcctactacatccattggatcaagcaaacaccaggccaaggtcttgagtgggttggcgtcatttacccaggaaacgatgatatatcttacaatcagaaatttcaagggaaagccacacttacagccgacaagagttccacaactgcatatatgcaactctcctccctgacatctgaagacagtgccgtatactattgtgctcgtgaagtcaggctcagatactttgacgtgtggggtcaaggcacaaccgtcaccgtcagtagc

SEQ ID NO: 685 - DNA, 336 bp, synthetic construct
  source 1..336: mol_type = other DNA
  misc_feature 1..336: note = nucleotide sequence coding VL1 of 33-5
gagatagtcctcacccaatcaccaggtagtctggctgttagcccaggtgagcgagttactatgtcttgcaagtcctctcaatctgtgttcttttcatcaagtcagaagaattatcttgcctggtatcagcagattcctggtcaatctccccgactgcttatttactgggcttcaactcgggagtcaggggttcccgaccgattcacagggtctgggtcaggaactgactttacccttactatcagctctgtgcagcctgaagacctcgcaatatattattgtcatcagtacctctcttctcgcacttttggacagggcaccaaattggagattaag

SEQ ID NO: 686 - DNA, 348 bp, synthetic construct
  source 1..348: mol_type = other DNA
  misc_feature 1..348: note = nucleotide sequence coding VH1 of 33-6 or VH1 of 33-7
caggtacagcttgtgcaatctggagctgaggtcaaaaaaccaggaagttctgtaaaggtgtcttgtaaggcatctggttacacatttaccgattacaacatgcattgggtacgtcaagcccctggccagggcctggaatggatcggatatatatacccctacaacggtggaacaggttacaaccaaaaattcaaaagcaaggctactatcactgccgacgagagcactaacaccgcttacatggaactgtcttccttgcgttcagaagacactgccgtgtattattgtgctcgggggcgacccgcaatggactattggggccaaggtacattggtgactgtcagttcc

SEQ ID NO: 687 - DNA, 333 bp, synthetic construct
  source 1..333: mol_type = other DNA
  misc_feature 1..333: note = nucleotide sequence coding VL1 of 33-6 or VL1 of 33-7
gacatccaaatgacacagtcccctagctcactttcagcaagcgtgggggaccgagttactatcacatgccgcgcaagtgagtctgtggacaactatggaatatcattcatgaactggttccagcagaaacctgggaaagcacccaagctgcttatctacgcagcaagtaatcagggtagtggcgtcccttctcgattcagtgggagcggtagcggcaccgacttcacccttaccatctcatcacttcaacccgatgattttgctacctactattgccagcaatccaaggaagttccttggaccttcgggcaagggacaaaggtagagattaaa

SEQ ID NO: 688 - protein, 5 aa, synthetic construct
  REGION 1..5: note = VH-CDR1 of 33-1, VH1-CDR1 of 33-4 or VH2-CDR1 of 33-6
DSNIH

SEQ ID NO: 689 - protein, 17 aa, synthetic construct
  REGION 1..17: note = VH-CDR2 of 33-1 , VH1-CDR2 of 33-4 or VH2-CDR2 of 33-6
YIYPYNGGTDYNQKFKN

SEQ ID NO: 690 - protein, 7 aa, synthetic construct
  REGION 1..7: note = VH-CDR3 of 33-1, VH1-CDR3 of 33-4 or VH2-CDR3 of 33-6
GNPWLAY

SEQ ID NO: 691 - protein, 15 aa, synthetic construct
  REGION 1..15: note = VL-CDR1 of 33-1, VL1-CDR1 of 33-4 or VL2-CDR1 of 33-6
RASESLDNYGIRFLT

SEQ ID NO: 692 - protein, 7 aa, synthetic construct
  REGION 1..7: note = VL-CDR2 of 33-1, VL1-CDR2 of 33-4 or VL2-CDR2 of 33-6
AASNQGS

SEQ ID NO: 693 - protein, 9 aa, synthetic construct
  REGION 1..9: note = VL-CDR3 of 33-1, VL1-CDR3 of 33-4 or VL2-CDR3 of 33-6
QQTKEVPWS

SEQ ID NO: 694 - protein, 5 aa, synthetic construct
  REGION 1..5: note = VH-CDR1 of 33-2, VH2-CDR1 of 33-4, VH2-CDR1 of 33-5, VH1-CDR1 of 33-6, VH1-CDR1 of 33-7 or VH2-CDR1 of 33-7
DYNMH

SEQ ID NO: 695 - protein, 17 aa, synthetic construct
  REGION 1..17: note = VH-CDR2 of 33-2, VH2-CDR2 of 33-4, VH2-CDR2 of 33-5, VH1-CDR2 of 33-6, VH1-CDR2 of 33-7 or VH2-CDR2 of 33-7
YIYPYNGGTGYNQKFKS

SEQ ID NO: 696 - protein, 7 aa, synthetic construct
  REGION 1..7: note = VH-CDR3 of 33-2, VH2-CDR3 of 33-4, VH2-CDR3 of 33-5, VH1-CDR3 of 33-6, VH1-CDR3 of 33-7 or VH2-CDR3 of 33-7
GRPAMDY

SEQ ID NO: 697 - protein, 15 aa, synthetic construct
  REGION 1..15: note = VL-CDR1 of 33-2, VL2-CDR1 of 33-4, VL2-CDR1 of 33-5, VL1-CDR1 of 33-6, VL1-CDR1 of 33-7 or VL2-CDR1 of 33-7
RASESVDNYGISFMN

SEQ ID NO: 698 - protein, 7 aa, synthetic construct
  REGION 1..7: note = VL-CDR2 of 33-2, VL2-CDR2 of 33-4, VL2-CDR2 of 33-5, VL1-CDR2 of 33-6, VL1-CDR2 of 33-7 or VL2-CDR2 of 33-7
AASNQGS

SEQ ID NO: 699 - protein, 9 aa, synthetic construct
  REGION 1..9: note = VL-CDR3 of 33-2, VL2-CDR3 of 33-4, VL2-CDR3 of 33-5, VL1-CDR3 of 33-6, VL1-CDR3 of 33-7 or VL2-CDR3 of 33-7
QQSKEVPWT

SEQ ID NO: 700 - protein, 5 aa, synthetic construct
  REGION 1..5: note = VH-CDR1 of 33-3 or VH1-CDR1 of 33-5
SYYIH

SEQ ID NO: 701 - protein, 17 aa, synthetic construct
  REGION 1..17: note = VH-CDR2 of 33-3 or VH1-CDR2 of 33-5
VIYPGNDDISYNQKFQG

SEQ ID NO: 702 - protein, 9 aa, synthetic construct
  REGION 1..9: note = VH-CDR3 of 33-3 or VH1-CDR3 of 33-5
EVRLRYFDV

SEQ ID NO: 703 - protein, 17 aa, synthetic construct
  REGION 1..17: note = VL-CDR1 of 33-3 or VL1-CDR1 of 33-5
KSSQSVFFSSSQKNYLA

SEQ ID NO: 704 - protein, 7 aa, synthetic construct
  REGION 1..7: note = VL-CDR2 of 33-3 or VL1-CDR2 of 33-5
WASTRES

SEQ ID NO: 705 - protein, 8 aa, synthetic construct
  REGION 1..8: note = VL-CDR3 of 33-3 or VL1-CDR3 of 33-5
HQYLSSRT

SEQ ID NO: 706 - protein, 449 aa, synthetic construct
  REGION 1..449: note = CEA01 HC
EVQLVESGGGVVQPGRSLRLSCSASGFDFTTYWMSWVRQAPGKCLEWIGEIHPDSSTINYAPSLKDRFTISRDNAKNTLFLQMDSLRPEDTGVYFCASLYFGFPWFAYWGQGTPVTVSSASTKGPSVFPLAPSSKSTSGGTAALGCLVKDYFPEPVTVSWNSGALTSGVHTFPAVLQSSGLYSLSSVVTVPSSSLGTQTYICNVNHKPSNTKVDKKVEPKSCDKTHTCPPCPAPELLGGPSVFLFPPKPKDTLMISRTPEVTCVVVDVSHEDPEVKFNWYVDGVEVHNAKTKPREEQYNSTYRVVSVLTVLHQDWLNGKEYKCKVSNKALPAPIEKTISKAKGQPREPQVYTLPPCREEMTKNQVSLWCLVKGFYPSDIAVEWESNGQPENNYKTTPPVLDSDGSFFLYSKLTVDKSRWQQGNVFSCSVMHEALHNHYTQKSLSLSPGK

SEQ ID NO: 707 - protein, 460 aa, synthetic construct
  REGION 1..460: note = CEA01 LC
DIQLTQSPSSLSASVGDRVTITCKASQDVGTSVAWYQQKPGKAPKLLIYWTSTRHTGVPSRFSGSGSGTDFTFTISSLQPEDIATYYCQQYSLYRSFGCGTKVEIKRTVAAPSVFIFPPSDEQLKSGTASVVCLLNNFYPREAKVQWKVDNALQSGNSQESVTEQDSKDSTYSLSSTLTLSKADYEKHKVYACEVTHQGLSSPVTKSFNRGECGGGGSGGGGSGGGGSEPKSSDKTHTCPPCPAPELLGGPSVFLFPPKPKDTLMISRTPEVTCVVVDVSHEDPEVKFNWYVDGVEVHNAKTKPREEQYNSTYRVVSVLTVLHQDWLNGKEYKCKVSNKALPAPIEKTISKAKGQPREPQVYTLPPCREEMTKNQVSLWCLVKGFYPSDIAVEWESNGQPENNYKTTPPVLDSDGSFFLYSKLTVDKSRWQQGNVFSCSVMHEALHNHYTQKSLSLSPGK

SEQ ID NO: 708 - protein, 451 aa, synthetic construct
  REGION 1..451: note = CEA02 HC
EVQLVESGGGLVQPGRSLRLSCAASGFTVSSYWMHWVRQAPGKCLEWVGFILNKANGGTTEYAASVKGRFTISRDDSKNTLYLQMNSLRAEDTAVYYCARDRGLRFYFDYWGQGTTVTVSSASTKGPSVFPLAPSSKSTSGGTAALGCLVKDYFPEPVTVSWNSGALTSGVHTFPAVLQSSGLYSLSSVVTVPSSSLGTQTYICNVNHKPSNTKVDKKVEPKSCDKTHTCPPCPAPELLGGPSVFLFPPKPKDTLMISRTPEVTCVVVDVSHEDPEVKFNWYVDGVEVHNAKTKPREEQYNSTYRVVSVLTVLHQDWLNGKEYKCKVSNKALPAPIEKTISKAKGQPREPQVYTLPPCREEMTKNQVSLWCLVKGFYPSDIAVEWESNGQPENNYKTTPPVLDSDGSFFLYSKLTVDKSRWQQGNVFSCSVMHEALHNHYTQKSLSLSPGK

SEQ ID NO: 709 - protein, 469 aa, synthetic construct
  REGION 1..469: note = CEA02 LC
QAVLTQPASLSASPGASASLTCTLRRGINVGAYSIYWYQQKPGSPPQYLLRYKSDSDKQQGSGVSSRFSASKDASANAGILLISGLQSEDEADYYCMIWHSGASAVFGCGTKLTVLGQPKAAPSVTLFPPSSEELQANKATLVCLISDFYPGAVTVAWKADSSPVKAGVETTTPSKQSNNKYAASSYLSLTPEQWKSHRSYSCQVTHEGSTVEKTVAPTECSGGGGSGGGGSGGGGSEPKSSDKTHTCPPCPAPELLGGPSVFLFPPKPKDTLMISRTPEVTCVVVDVSHEDPEVKFNWYVDGVEVHNAKTKPREEQYNSTYRVVSVLTVLHQDWLNGKEYKCKVSNKALPAPIEKTISKAKGQPREPQVYTLPPCREEMTKNQVSLWCLVKGFYPSDIAVEWESNGQPENNYKTTPPVLDSDGSFFLYSKLTVDKSRWQQGNVFSCSVMHEALHNHYTQKSLSLSPGK

SEQ ID NO: 710 - protein, 450 aa, synthetic construct
  REGION 1..450: note = CEA03 HC
EVQLQQSGPGLVRPSQTLSLTCTASGFNIKDNYMHWVRQPPGRCLEWIGWIDPENGDTEYAPKFRGRVTMLADTSKNQFSLRLSSVTAADTAVYYCHVLIYAGYLAMDYWGQGTLVTVSSASTKGPSVFPLAPSSKSTSGGTAALGCLVKDYFPEPVTVSWNSGALTSGVHTFPAVLQSSGLYSLSSVVTVPSSSLGTQTYICNVNHKPSNTKVDKKVEPKSCDKTHTCPPCPAPELLGGPSVFLFPPKPKDTLMISRTPEVTCVVVDVSHEDPEVKFNWYVDGVEVHNAKTKPREEQYNSTYRVVSVLTVLHQDWLNGKEYKCKVSNKALPAPIEKTISKAKGQPREPQVYTLPPCREEMTKNQVSLWCLVKGFYPSDIAVEWESNGQPENNYKTTPPVLDSDGSFFLYSKLTVDKSRWQQGNVFSCSVMHEALHNHYTQKSLSLSPGK

SEQ ID NO: 711 - protein, 460 aa, synthetic construct
  REGION 1..460: note = CEA03 LC
DIQMTQSPSSLSASVGDRVTITCSASSSVTYMHWYQQKPGKAPKLWIYSTSNLASGVPSRFSGSGSGTDYTFTISSLQPEDIATYYCQQRSTYPLTFGCGTKLEIKRTVAAPSVFIFPPSDEQLKSGTASVVCLLNNFYPREAKVQWKVDNALQSGNSQESVTEQDSKDSTYSLSSTLTLSKADYEKHKVYACEVTHQGLSSPVTKSFNRGECGGGGSGGGGSGGGGSEPKSSDKTHTCPPCPAPELLGGPSVFLFPPKPKDTLMISRTPEVTCVVVDVSHEDPEVKFNWYVDGVEVHNAKTKPREEQYNSTYRVVSVLTVLHQDWLNGKEYKCKVSNKALPAPIEKTISKAKGQPREPQVYTLPPCREEMTKNQVSLWCLVKGFYPSDIAVEWESNGQPENNYKTTPPVLDSDGSFFLYSKLTVDKSRWQQGNVFSCSVMHEALHNHYTQKSLSLSPGK

SEQ ID NO: 712 - protein, 451 aa, synthetic construct
  REGION 1..451: note = CEA04 HC
EVQLVESGGGLVQPGGSLRLSCAASGFNIKDTYMHWVRQAPGKCLEWVARIDPANGNSKYADSVKGRFTISADTSKNTAYLQMNSLRAEDTAVYYCAPFGYYVSDYAMAYWGQGTLVTVSSASTKGPSVFPLAPSSKSTSGGTAALGCLVKDYFPEPVTVSWNSGALTSGVHTFPAVLQSSGLYSLSSVVTVPSSSLGTQTYICNVNHKPSNTKVDKKVEPKSCDKTHTCPPCPAPELLGGPSVFLFPPKPKDTLMISRTPEVTCVVVDVSHEDPEVKFNWYVDGVEVHNAKTKPREEQYNSTYRVVSVLTVLHQDWLNGKEYKCKVSNKALPAPIEKTISKAKGQPREPQVYTLPPCREEMTKNQVSLWCLVKGFYPSDIAVEWESNGQPENNYKTTPPVLDSDGSFFLYSKLTVDKSRWQQGNVFSCSVMHEALHNHYTQKSLSLSPGK

SEQ ID NO: 713 - protein, 465 aa, synthetic construct
  REGION 1..465: note = CEA04 LC
DIQLTQSPSSLSASVGDRVTITCRAGESVDIFGVGFLHWYQQKPGKAPKLLIYRASNLESGVPSRFSGSGSRTDFTLTISSLQPEDFATYYCQQTNEDPYTFGCGTKVEIKRTVAAPSVFIFPPSDEQLKSGTASVVCLLNNFYPREAKVQWKVDNALQSGNSQESVTEQDSKDSTYSLSSTLTLSKADYEKHKVYACEVTHQGLSSPVTKSFNRGECGGGGSGGGGSGGGGSEPKSSDKTHTCPPCPAPELLGGPSVFLFPPKPKDTLMISRTPEVTCVVVDVSHEDPEVKFNWYVDGVEVHNAKTKPREEQYNSTYRVVSVLTVLHQDWLNGKEYKCKVSNKALPAPIEKTISKAKGQPREPQVYTLPPCREEMTKNQVSLWCLVKGFYPSDIAVEWESNGQPENNYKTTPPVLDSDGSFFLYSKLTVDKSRWQQGNVFSCSVMHEALHNHYTQKSLSLSPGK

SEQ ID NO: 714 - DNA, 1347 bp, synthetic construct
  source 1..1347: mol_type = other DNA
  misc_feature 1..1347: note = nucleotide sequence coding HC of CEA01
gaagtgcaactcgtagaatccggcgggggcgtcgtacagcccggccgttctttgagacttagctgtagtgcttctgggtttgacttcactacatactggatgtcatgggtaagacaggcacctggcaagtgccttgaatggatcggtgaaatccatcccgacagctccacaatcaactacgccccaagtttgaaagaccggttcaccatatctcgtgacaacgccaagaatacattgttccttcagatggatagtcttcgtccagaggatactggggtatatttttgtgccagcttgtattttggcttcccctggttcgcttattggggccaaggtacacccgtcactgtctcttctgctagcaccaaaggacctagtgtttttcctcttgccccttcctcaaagtctacctctggggggacagccgctctgggctgcctggtcaaggattatttcccagagcctgtcactgtcagttggaactctggagccttgacttctggtgttcatacatttcctgctgtccttcaaagcagcggcttgtactcattgtcttctgttgtgacagtaccctcaagcagcctcggcactcagacatacatctgcaatgtcaaccacaaaccctcaaatacaaaggtagataaaaaagtcgaaccaaagtcttgtgacaaaactcacacgtgcccaccgtgcccagcacctgaactcctggggggaccgtcagtcttcctcttccccccaaaacccaaggacaccctcatgatctcccggacccctgaggtcacatgcgtggtggtggacgtgagccacgaagaccctgaggtcaagttcaactggtacgtggacggcgtggaggtgcataatgccaagacaaagccgcgggaggagcagtacaacagcacgtaccgtgtggtcagcgtcctcaccgtcctgcaccaggactggctgaatggcaaggagtacaagtgcaaggtctccaacaaagccctcccagcccccatcgagaaaaccatctccaaagccaaagggcagccccgagaaccacaggtgtacaccctgcccccatgccgggaggagatgaccaagaaccaggtcagcctgtggtgcctggtcaaaggcttctatcccagcgacatcgccgtggagtgggagagcaatgggcagccggagaacaactacaagaccacgcctcccgtgctggactccgacggctccttcttcctctacagcaagctcaccgtggacaagagcaggtggcagcaggggaacgtcttctcatgctccgtgatgcatgaggctctgcacaaccactacacgcagaagagcctctccctgtctccgggtaaa

SEQ ID NO: 715 - DNA, 1380 bp, synthetic construct
  source 1..1380: mol_type = other DNA
  misc_feature 1..1380: note = nucleotide sequence coding LC of CEA01
gacatccaacttacccagtcaccctcatctcttagtgcctctgtaggggaccgagttactattacatgtaaagccagtcaagatgttggcacctcagtagcatggtatcaacaaaagcctggtaaagccccaaaactgctgatctattggacaagcacacgacatacaggagtgccaagtcgcttcagcggttcaggttcaggcacagattttacattcactatatcaagcctgcaacccgaggacattgccacatattactgccagcaatatagtctgtatcgtagcttcggatgtggcaccaaggttgaaattaagcgtacggtggcagctcccagcgtttttatctttcccccatccgacgagcagctcaagagtggcactgcctctgtagtttgtttgctgaataacttctatccacgtgaagcaaaagtacagtggaaggtcgataatgcccttcagagcggtaacagccaagaaagtgttaccgagcaagattccaaagattccacttacagtctgtccagcacattgacactgagtaaggctgattacgaaaaacacaaggtgtacgcatgcgaggtgacacaccaaggtctttcatctcctgtaactaagagctttaaccggggagaatgtggtggtgggggcagcgggggcggaggtagtggaggcggcggtagtgaaccaaagagtagtgacaaaactcacacgtgcccaccgtgcccagcacctgaactcctggggggaccgtcagtcttcctcttccccccaaaacccaaggacaccctcatgatctcccggacccctgaggtcacatgcgtggtggtggacgtgagccacgaagaccctgaggtcaagttcaactggtacgtggacggcgtggaggtgcataatgccaagacaaagccgcgggaggagcagtacaacagcacgtaccgtgtggtcagcgtcctcaccgtcctgcaccaggactggctgaatggcaaggagtacaagtgcaaggtctccaacaaagccctcccagcccccatcgagaaaaccatctccaaagccaaagggcagccccgagaaccacaggtgtacaccctgcccccatgccgggaggagatgaccaagaaccaggtcagcctgtggtgcctggtcaaaggcttctatcccagcgacatcgccgtggagtgggagagcaatgggcagccggagaacaactacaagaccacgcctcccgtgctggactccgacggctccttcttcctctacagcaagctcaccgtggacaagagcaggtggcagcaggggaacgtcttctcatgctccgtgatgcatgaggctctgcacaaccactacacgcagaagagcctctccctgtctccgggtaaa

SEQ ID NO: 716 - DNA, 1353 bp, synthetic construct
  source 1..1353: mol_type = other DNA
  misc_feature 1..1353: note = nucleotide sequence coding HC of CEA02
gaagttcaactggtggagtctggcggcggacttgtccagccagggcgaagcctgcgtctctcatgcgctgcctccggtttcactgtttcttcatactggatgcactgggtaagacaggctcctggcaagtgtcttgaatgggtgggcttcattttgaacaaggcaaacggcgggactaccgaatacgctgccagcgttaagggtcgattcaccatctcaagggatgattctaaaaacacattgtaccttcagatgaactctctgagggccgaggacacagcagtctactattgcgctagagatagggggcttagattctattttgactactgggggcagggaacaactgtcaccgtttccagtgctagcaccaaaggacctagtgtttttcctcttgccccttcctcaaagtctacctctggggggacagccgctctgggctgcctggtcaaggattatttcccagagcctgtcactgtcagttggaactctggagccttgacttctggtgttcatacatttcctgctgtccttcaaagcagcggcttgtactcattgtcttctgttgtgacagtaccctcaagcagcctcggcactcagacatacatctgcaatgtcaaccacaaaccctcaaatacaaaggtagataaaaaagtcgaaccaaagtcttgtgacaaaactcacacgtgcccaccgtgcccagcacctgaactcctggggggaccgtcagtcttcctcttccccccaaaacccaaggacaccctcatgatctcccggacccctgaggtcacatgcgtggtggtggacgtgagccacgaagaccctgaggtcaagttcaactggtacgtggacggcgtggaggtgcataatgccaagacaaagccgcgggaggagcagtacaacagcacgtaccgtgtggtcagcgtcctcaccgtcctgcaccaggactggctgaatggcaaggagtacaagtgcaaggtctccaacaaagccctcccagcccccatcgagaaaaccatctccaaagccaaagggcagccccgagaaccacaggtgtacaccctgcccccatgccgggaggagatgaccaagaaccaggtcagcctgtggtgcctggtcaaaggcttctatcccagcgacatcgccgtggagtgggagagcaatgggcagccggagaacaactacaagaccacgcctcccgtgctggactccgacggctccttcttcctctacagcaagctcaccgtggacaagagcaggtggcagcaggggaacgtcttctcatgctccgtgatgcatgaggctctgcacaaccactacacgcagaagagcctctccctgtctccgggtaaa

SEQ ID NO: 717 - DNA, 1407 bp, synthetic construct
  source 1..1407: mol_type = other DNA
  misc_feature 1..1407: note = nucleotide sequence coding LC of CEA02
caggcagtgcttactcagcctgcttcactctctgcctcaccaggagcatctgcaagcctcacctgcacattgcgtcgaggtataaacgtaggcgcttactcaatttactggtaccagcagaaacctgggagcccacctcaatacctcctccgatacaagagcgattctgataagcaacagggcagtggtgtatccagcagattttccgccagcaaggatgcaagcgctaatgcaggtattcttctcatttcaggcttgcaaagcgaggacgaagcagactactactgcatgatttggcactccggtgcctccgcagtttttggctgcggaacaaagcttacagtccttggtcagcccaaggctgccccctcggtcactctgttcccgccctcctctgaggagcttcaagccaacaaggccacactggtgtgtctcataagtgacttctacccgggagccgtgacagtggcctggaaggcagatagcagccccgtcaaggcgggagtggagaccaccacaccctccaaacaaagcaacaacaagtacgcggccagcagctatctgagcctgacgcctgagcagtggaagtcccacagaagctacagctgccaggtcacgcatgaagggagcaccgtggagaagacagtggcccctacagaatgttcaggtggtgggggcagcgggggcggaggtagtggaggcggcggtagtgaaccaaagagtagtgacaaaactcacacgtgcccaccgtgcccagcacctgaactcctggggggaccgtcagtcttcctcttccccccaaaacccaaggacaccctcatgatctcccggacccctgaggtcacatgcgtggtggtggacgtgagccacgaagaccctgaggtcaagttcaactggtacgtggacggcgtggaggtgcataatgccaagacaaagccgcgggaggagcagtacaacagcacgtaccgtgtggtcagcgtcctcaccgtcctgcaccaggactggctgaatggcaaggagtacaagtgcaaggtctccaacaaagccctcccagcccccatcgagaaaaccatctccaaagccaaagggcagccccgagaaccacaggtgtacaccctgcccccatgccgggaggagatgaccaagaaccaggtcagcctgtggtgcctggtcaaaggcttctatcccagcgacatcgccgtggagtgggagagcaatgggcagccggagaacaactacaagaccacgcctcccgtgctggactccgacggctccttcttcctctacagcaagctcaccgtggacaagagcaggtggcagcaggggaacgtcttctcatgctccgtgatgcatgaggctctgcacaaccactacacgcagaagagcctctccctgtctccgggtaaa

SEQ ID NO: 718 - DNA, 1350 bp, synthetic construct
  source 1..1350: mol_type = other DNA
  misc_feature 1..1350: note = nucleotide sequence coding HC of CEA03
gaggtacaactgcagcaaagcggtccaggccttgttcggcctagccagactctgtcactgacctgtaccgcaagcggtttcaatatcaaggacaactatatgcactgggtccgccagcctccaggacgctgtttggagtggataggatggatagacccagaaaatggggataccgaatacgctccaaaatttcgtggacgagttaccatgctggccgatacatccaaaaaccagttttctctgaggctctccagcgtgacagccgcagataccgccgtatattactgtcatgtgttgatctatgccgggtatcttgcaatggattactggggacagggcactctcgtaacagtctcttcagctagcaccaaaggacctagtgtttttcctcttgccccttcctcaaagtctacctctggggggacagccgctctgggctgcctggtcaaggattatttcccagagcctgtcactgtcagttggaactctggagccttgacttctggtgttcatacatttcctgctgtccttcaaagcagcggcttgtactcattgtcttctgttgtgacagtaccctcaagcagcctcggcactcagacatacatctgcaatgtcaaccacaaaccctcaaatacaaaggtagataaaaaagtcgaaccaaagtcttgtgacaaaactcacacgtgcccaccgtgcccagcacctgaactcctggggggaccgtcagtcttcctcttccccccaaaacccaaggacaccctcatgatctcccggacccctgaggtcacatgcgtggtggtggacgtgagccacgaagaccctgaggtcaagttcaactggtacgtggacggcgtggaggtgcataatgccaagacaaagccgcgggaggagcagtacaacagcacgtaccgtgtggtcagcgtcctcaccgtcctgcaccaggactggctgaatggcaaggagtacaagtgcaaggtctccaacaaagccctcccagcccccatcgagaaaaccatctccaaagccaaagggcagccccgagaaccacaggtgtacaccctgcccccatgccgggaggagatgaccaagaaccaggtcagcctgtggtgcctggtcaaaggcttctatcccagcgacatcgccgtggagtgggagagcaatgggcagccggagaacaactacaagaccacgcctcccgtgctggactccgacggctccttcttcctctacagcaagctcaccgtggacaagagcaggtggcagcaggggaacgtcttctcatgctccgtgatgcatgaggctctgcacaaccactacacgcagaagagcctctccctgtctccgggtaaa

SEQ ID NO: 719 - DNA, 1380 bp, synthetic construct
  source 1..1380: mol_type = other DNA
  misc_feature 1..1380: note = nucleotide sequence coding LC of CEA03
gacatacaaatgacccaaagcccaagctcattgagcgcctccgtaggagatcgcgtaacaataacctgcagcgccagcagttcagtaacttatatgcactggtatcagcagaagccaggtaaggctcccaaactgtggatatatagcaccagcaacctggcatctggtgtaccctctcgatttagtggcagtggttctggaacagactataccttcactatatcttctcttcagcctgaggatatagccacttactattgccagcaacgttccacttaccccctgacttttgggtgtggtacaaagttggaaataaagcgtacggtggcagctcccagcgtttttatctttcccccatccgacgagcagctcaagagtggcactgcctctgtagtttgtttgctgaataacttctatccacgtgaagcaaaagtacagtggaaggtcgataatgcccttcagagcggtaacagccaagaaagtgttaccgagcaagattccaaagattccacttacagtctgtccagcacattgacactgagtaaggctgattacgaaaaacacaaggtgtacgcatgcgaggtgacacaccaaggtctttcatctcctgtaactaagagctttaaccggggagaatgtggtggtgggggcagcgggggcggaggtagtggaggcggcggtagtgaaccaaagagtagtgacaaaactcacacgtgcccaccgtgcccagcacctgaactcctggggggaccgtcagtcttcctcttccccccaaaacccaaggacaccctcatgatctcccggacccctgaggtcacatgcgtggtggtggacgtgagccacgaagaccctgaggtcaagttcaactggtacgtggacggcgtggaggtgcataatgccaagacaaagccgcgggaggagcagtacaacagcacgtaccgtgtggtcagcgtcctcaccgtcctgcaccaggactggctgaatggcaaggagtacaagtgcaaggtctccaacaaagccctcccagcccccatcgagaaaaccatctccaaagccaaagggcagccccgagaaccacaggtgtacaccctgcccccatgccgggaggagatgaccaagaaccaggtcagcctgtggtgcctggtcaaaggcttctatcccagcgacatcgccgtggagtgggagagcaatgggcagccggagaacaactacaagaccacgcctcccgtgctggactccgacggctccttcttcctctacagcaagctcaccgtggacaagagcaggtggcagcaggggaacgtcttctcatgctccgtgatgcatgaggctctgcacaaccactacacgcagaagagcctctccctgtctccgggtaaa

SEQ ID NO: 720 - DNA, 1353 bp, synthetic construct
  source 1..1353: mol_type = other DNA
  misc_feature 1..1353: note = nucleotide sequence coding HC of CEA04
gaagtgcagttggtggagtctgggggcgggttggtccaaccaggaggctctctgcgactctcttgcgcagcatcaggcttcaacataaaggacacatatatgcactgggttcggcaggctcccggaaaatgtcttgaatgggtcgcccgaattgatcctgcaaatgggaacagtaaatacgcagattcagttaaaggccgcttcactatcagcgcagatacatccaaaaacaccgcataccttcagatgaactcactccgtgcagaagacactgcagtctactattgcgctcccttcggttactacgtctctgactatgcaatggcttactggggccaaggaaccttggtgactgtatcttctgctagcaccaaaggacctagtgtttttcctcttgccccttcctcaaagtctacctctggggggacagccgctctgggctgcctggtcaaggattatttcccagagcctgtcactgtcagttggaactctggagccttgacttctggtgttcatacatttcctgctgtccttcaaagcagcggcttgtactcattgtcttctgttgtgacagtaccctcaagcagcctcggcactcagacatacatctgcaatgtcaaccacaaaccctcaaatacaaaggtagataaaaaagtcgaaccaaagtcttgtgacaaaactcacacgtgcccaccgtgcccagcacctgaactcctggggggaccgtcagtcttcctcttccccccaaaacccaaggacaccctcatgatctcccggacccctgaggtcacatgcgtggtggtggacgtgagccacgaagaccctgaggtcaagttcaactggtacgtggacggcgtggaggtgcataatgccaagacaaagccgcgggaggagcagtacaacagcacgtaccgtgtggtcagcgtcctcaccgtcctgcaccaggactggctgaatggcaaggagtacaagtgcaaggtctccaacaaagccctcccagcccccatcgagaaaaccatctccaaagccaaagggcagccccgagaaccacaggtgtacaccctgcccccatgccgggaggagatgaccaagaaccaggtcagcctgtggtgcctggtcaaaggcttctatcccagcgacatcgccgtggagtgggagagcaatgggcagccggagaacaactacaagaccacgcctcccgtgctggactccgacggctccttcttcctctacagcaagctcaccgtggacaagagcaggtggcagcaggggaacgtcttctcatgctccgtgatgcatgaggctctgcacaaccactacacgcagaagagcctctccctgtctccgggtaaa

SEQ ID NO: 721 - DNA, 1395 bp, synthetic construct
  source 1..1395: mol_type = other DNA
  misc_feature 1..1395: note = nucleotide sequence coding LC of CEA04
gatatacagcttacacaatcaccctcctccctgtctgcctccgtaggagatagagtaacaatcacatgcagagctggcgagagtgttgatatattcggtgttggatttttgcactggtaccaacagaaaccagggaaagcacctaagctcttgatttatagagcttctaaccttgagagcggggtgcctagtaggttttctgggtcaggaagtcggaccgattttactctcacaatttcatcccttcagcccgaagactttgcaacctactactgtcagcagacaaacgaagacccctatacattcggatgtggtacaaaggtggagattaaacgtacggtggcagctcccagcgtttttatctttcccccatccgacgagcagctcaagagtggcactgcctctgtagtttgtttgctgaataacttctatccacgtgaagcaaaagtacagtggaaggtcgataatgcccttcagagcggtaacagccaagaaagtgttaccgagcaagattccaaagattccacttacagtctgtccagcacattgacactgagtaaggctgattacgaaaaacacaaggtgtacgcatgcgaggtgacacaccaaggtctttcatctcctgtaactaagagctttaaccggggagaatgtggtggtgggggcagcgggggcggaggtagtggaggcggcggtagtgaaccaaagagtagtgacaaaactcacacgtgcccaccgtgcccagcacctgaactcctggggggaccgtcagtcttcctcttccccccaaaacccaaggacaccctcatgatctcccggacccctgaggtcacatgcgtggtggtggacgtgagccacgaagaccctgaggtcaagttcaactggtacgtggacggcgtggaggtgcataatgccaagacaaagccgcgggaggagcagtacaacagcacgtaccgtgtggtcagcgtcctcaccgtcctgcaccaggactggctgaatggcaaggagtacaagtgcaaggtctccaacaaagccctcccagcccccatcgagaaaaccatctccaaagccaaagggcagccccgagaaccacaggtgtacaccctgcccccatgccgggaggagatgaccaagaaccaggtcagcctgtggtgcctggtcaaaggcttctatcccagcgacatcgccgtggagtgggagagcaatgggcagccggagaacaactacaagaccacgcctcccgtgctggactccgacggctccttcttcctctacagcaagctcaccgtggacaagagcaggtggcagcaggggaacgtcttctcatgctccgtgatgcatgaggctctgcacaaccactacacgcagaagagcctctccctgtctccgggtaaa

SEQ ID NO: 722 - DNA, 318 bp, synthetic construct
  source 1..318: mol_type = other DNA
  misc_feature 1..318: note = nucleotide sequence coding VL of CEA01
gacatccaacttacccagtcaccctcatctcttagtgcctctgtaggggaccgagttactattacatgtaaagccagtcaagatgttggcacctcagtagcatggtatcaacaaaagcctggtaaagccccaaaactgctgatctattggacaagcacacgacatacaggagtgccaagtcgcttcagcggttcaggttcaggcacagattttacattcactatatcaagcctgcaacccgaggacattgccacatattactgccagcaatatagtctgtatcgtagcttcggatgtggcaccaaggttgaaattaag

SEQ ID NO: 723 - DNA, 363 bp, synthetic construct
  source 1..363: mol_type = other DNA
  misc_feature 1..363: note = nucleotide sequence coding VH of CEA02
gaagttcaactggtggagtctggcggcggacttgtccagccagggcgaagcctgcgtctctcatgcgctgcctccggtttcactgtttcttcatactggatgcactgggtaagacaggctcctggcaagtgtcttgaatgggtgggcttcattttgaacaaggcaaacggcgggactaccgaatacgctgccagcgttaagggtcgattcaccatctcaagggatgattctaaaaacacattgtaccttcagatgaactctctgagggccgaggacacagcagtctactattgcgctagagatagggggcttagattctattttgactactgggggcagggaacaactgtcaccgtttccagt

SEQ ID NO: 724 - DNA, 348 bp, synthetic construct
  source 1..348: mol_type = other DNA
  misc_feature 1..348: note = nucleotide sequence coding VL of CEA02
caggcagtgcttactcagcctgcttcactctctgcctcaccaggagcatctgcaagcctcacctgcacattgcgtcgaggtataaacgtaggcgcttactcaatttactggtaccagcagaaacctgggagcccacctcaatacctcctccgatacaagagcgattctgataagcaacagggcagtggtgtatccagcagattttccgccagcaaggatgcaagcgctaatgcaggtattcttctcatttcaggcttgcaaagcgaggacgaagcagactactactgcatgatttggcactccggtgcctccgcagtttttggctgcggaacaaagcttacagtcctt

SEQ ID NO: 725 - DNA, 360 bp, synthetic construct
  source 1..360: mol_type = other DNA
  misc_feature 1..360: note = nucleotide sequence coding VH of CEA03
gaggtacaactgcagcaaagcggtccaggccttgttcggcctagccagactctgtcactgacctgtaccgcaagcggtttcaatatcaaggacaactatatgcactgggtccgccagcctccaggacgctgtttggagtggataggatggatagacccagaaaatggggataccgaatacgctccaaaatttcgtggacgagttaccatgctggccgatacatccaaaaaccagttttctctgaggctctccagcgtgacagccgcagataccgccgtatattactgtcatgtgttgatctatgccgggtatcttgcaatggattactggggacagggcactctcgtaacagtctcttca

SEQ ID NO: 726 - DNA, 318 bp, synthetic construct
  source 1..318: mol_type = other DNA
  misc_feature 1..318: note = nucleotide sequence coding VL of CEA03
gacatacaaatgacccaaagcccaagctcattgagcgcctccgtaggagatcgcgtaacaataacctgcagcgccagcagttcagtaacttatatgcactggtatcagcagaagccaggtaaggctcccaaactgtggatatatagcaccagcaacctggcatctggtgtaccctctcgatttagtggcagtggttctggaacagactataccttcactatatcttctcttcagcctgaggatatagccacttactattgccagcaacgttccacttaccccctgacttttgggtgtggtacaaagttggaaataaag

SEQ ID NO: 727 - DNA, 363 bp, synthetic construct
  source 1..363: mol_type = other DNA
  misc_feature 1..363: note = nucleotide sequence coding VH of CEA04
gaagtgcagttggtggagtctgggggcgggttggtccaaccaggaggctctctgcgactctcttgcgcagcatcaggcttcaacataaaggacacatatatgcactgggttcggcaggctcccggaaaatgtcttgaatgggtcgcccgaattgatcctgcaaatgggaacagtaaatacgcagattcagttaaaggccgcttcactatcagcgcagatacatccaaaaacaccgcataccttcagatgaactcactccgtgcagaagacactgcagtctactattgcgctcccttcggttactacgtctctgactatgcaatggcttactggggccaaggaaccttggtgactgtatcttct

SEQ ID NO: 728 - DNA, 333 bp, synthetic construct
  source 1..333: mol_type = other DNA
  misc_feature 1..333: note = nucleotide sequence coding VL of CEA04
gatatacagcttacacaatcaccctcctccctgtctgcctccgtaggagatagagtaacaatcacatgcagagctggcgagagtgttgatatattcggtgttggatttttgcactggtaccaacagaaaccagggaaagcacctaagctcttgatttatagagcttctaaccttgagagcggggtgcctagtaggttttctgggtcaggaagtcggaccgattttactctcacaatttcatcccttcagcccgaagactttgcaacctactactgtcagcagacaaacgaagacccctatacattcggatgtggtacaaaggtggagattaaa

SEQ ID NO: 729 - protein, 5 aa, synthetic construct
  REGION 1..5: note = VH-CDR1 of CEA01
TYWMS

SEQ ID NO: 730 - protein, 17 aa, synthetic construct
  REGION 1..17: note = VH-CDR2 of CEA01
EIHPDSSTINYAPSLKD

SEQ ID NO: 731 - protein, 10 aa, synthetic construct
  REGION 1..10: note = VH-CDR3 of CEA01
LYFGFPWFAY

SEQ ID NO: 732 - protein, 11 aa, synthetic construct
  REGION 1..11: note = VL-CDR1 of CEA01
KASQDVGTSVA

SEQ ID NO: 733 - protein, 7 aa, synthetic construct
  REGION 1..7: note = VL-CDR2 of CEA01
WTSTRHT

SEQ ID NO: 734 - protein, 8 aa, synthetic construct
  REGION 1..8: note = VL-CDR3 of CEA01
QQYSLYRS

SEQ ID NO: 735 - protein, 5 aa, synthetic construct
  REGION 1..5: note = VH-CDR1 of CEA02
SYWMH

SEQ ID NO: 736 - protein, 19 aa, synthetic construct
  REGION 1..19: note = VH-CDR2 of CEA02
FILNKANGGTTEYAASVKG

SEQ ID NO: 737 - protein, 10 aa, synthetic construct
  REGION 1..10: note = VH-CDR3 of CEA02
DRGLRFYFDY

SEQ ID NO: 738 - protein, 14 aa, synthetic construct
  REGION 1..14: note = VL-CDR1 of CEA02
TLRRGINVGAYSIY

SEQ ID NO: 739 - protein, 7 aa, synthetic construct
  REGION 1..7: note = VL-CDR2 of CEA02
SDKQQGS

SEQ ID NO: 740 - protein, 10 aa, synthetic construct
  REGION 1..10: note = VL-CDR3 of CEA02
MIWHSGASAV

SEQ ID NO: 741 - protein, 5 aa, synthetic construct
  REGION 1..5: note = VH-CDR1 of CEA03
DNYMH

SEQ ID NO: 742 - protein, 17 aa, synthetic construct
  REGION 1..17: note = VH-CDR2 of CEA03
WIDPENGDTEYAPKFRG

SEQ ID NO: 743 - protein, 11 aa, synthetic construct
  REGION 1..11: note = VH-CDR3 of CEA03
LIYAGYLAMDY

SEQ ID NO: 744 - protein, 10 aa, synthetic construct
  REGION 1..10: note = VL-CDR1 of CEA03
SASSSVTYMH

SEQ ID NO: 745 - protein, 7 aa, synthetic construct
  REGION 1..7: note = VL-CDR2 of CEA03
STSNLAS

SEQ ID NO: 746 - protein, 9 aa, synthetic construct
  REGION 1..9: note = VL-CDR3 of CEA03
QQRSTYPLT

SEQ ID NO: 747 - protein, 5 aa, synthetic construct
  REGION 1..5: note = VH-CDR1 of CEA04
DTYMH

SEQ ID NO: 748 - protein, 17 aa, synthetic construct
  REGION 1..17: note = VH-CDR2 of CEA04
RIDPANGNSKYADSVKG

SEQ ID NO: 749 - protein, 12 aa, synthetic construct
  REGION 1..12: note = VH-CDR3 of CEA04
FGYYVSDYAMAY

SEQ ID NO: 750 - protein, 15 aa, synthetic construct
  REGION 1..15: note = VL-CDR1 of CEA04
RAGESVDIFGVGFLH

SEQ ID NO: 751 - protein, 7 aa, synthetic construct
  REGION 1..7: note = VL-CDR2 of CEA04
RASNLES

SEQ ID NO: 752 - protein, 9 aa, synthetic construct
  REGION 1..9: note = VL-CDR3 of CEA04
QQTNEDPYT

SEQ ID NO: 753 - protein, 451 aa, synthetic construct
  REGION 1..451: note = T01 HC
QVQLQQSGSELKKPGASVKVSCKASGYTFTNYGMNWVKQAPGQCLKWMGWINTYTGEPTYTDDFKGRFAFSLDTSVSTAYLQISSLKADDTAVYFCARGGFGSSYWYFDVWGQGSLVTVSSASTKGPSVFPLAPSSKSTSGGTAALGCLVKDYFPEPVTVSWNSGALTSGVHTFPAVLQSSGLYSLSSVVTVPSSSLGTQTYICNVNHKPSNTKVDKKVEPKSCDKTHTCPPCPAPELLGGPSVFLFPPKPKDTLMISRTPEVTCVVVDVSHEDPEVKFNWYVDGVEVHNAKTKPREEQYNSTYRVVSVLTVLHQDWLNGKEYKCKVSNKALPAPIEKTISKAKGQPREPQVYTLPPCREEMTKNQVSLWCLVKGFYPSDIAVEWESNGQPENNYKTTPPVLDSDGSFFLYSKLTVDKSRWQQGNVFSCSVMHEALHNHYTQKSLSLSPGK

SEQ ID NO: 754 - protein, 461 aa, synthetic construct
  REGION 1..461: note = T01 LC
DIQLTQSPSSLSASVGDRVSITCKASQDVSIAVAWYQQKPGKAPKLLIYSASYRYTGVPDRFSGSGSGTDFTLTISSLQPEDFAVYYCQQHYITPLTFGCGTKVEIKRTVAAPSVFIFPPSDEQLKSGTASVVCLLNNFYPREAKVQWKVDNALQSGNSQESVTEQDSKDSTYSLSSTLTLSKADYEKHKVYACEVTHQGLSSPVTKSFNRGECGGGGSGGGGSGGGGSEPKSSDKTHTCPPCPAPELLGGPSVFLFPPKPKDTLMISRTPEVTCVVVDVSHEDPEVKFNWYVDGVEVHNAKTKPREEQYNSTYRVVSVLTVLHQDWLNGKEYKCKVSNKALPAPIEKTISKAKGQPREPQVYTLPPCREEMTKNQVSLWCLVKGFYPSDIAVEWESNGQPENNYKTTPPVLDSDGSFFLYSKLTVDKSRWQQGNVFSCSVMHEALHNHYTQKSLSLSPGK

SEQ ID NO: 755 - protein, 449 aa, synthetic construct
  REGION 1..449: note = MSM01 HC
QVQLQQSGPELEKPGASVKISCKASGYSFTGYTMNWVKQSHGKCLEWIGLITPYNGASSYNQKFRGKATLTVDKSSSTAYMDLLSLTSEDSAVYFCARGGYDGRGFDYWGQGTTVTVSSASTKGPSVFPLAPSSKSTSGGTAALGCLVKDYFPEPVTVSWNSGALTSGVHTFPAVLQSSGLYSLSSVVTVPSSSLGTQTYICNVNHKPSNTKVDKKVEPKSCDKTHTCPPCPAPELLGGPSVFLFPPKPKDTLMISRTPEVTCVVVDVSHEDPEVKFNWYVDGVEVHNAKTKPREEQYNSTYRVVSVLTVLHQDWLNGKEYKCKVSNKALPAPIEKTISKAKGQPREPQVYTLPPCREEMTKNQVSLWCLVKGFYPSDIAVEWESNGQPENNYKTTPPVLDSDGSFFLYSKLTVDKSRWQQGNVFSCSVMHEALHNHYTQKSLSLSPGK

SEQ ID NO: 756 - protein, 460 aa, synthetic construct
  REGION 1..460: note = MSM01 LC
DIELTQSPAIMSASPGEKVTMTCSASSSVSYMHWYQQKSGTSPKRWIYDTSKLASGVPGRFSGSGSGNSYSLTISSVEAEDDATYYCQQWSKHPLTFGCGTKLEIKRTVAAPSVFIFPPSDEQLKSGTASVVCLLNNFYPREAKVQWKVDNALQSGNSQESVTEQDSKDSTYSLSSTLTLSKADYEKHKVYACEVTHQGLSSPVTKSFNRGECGGGGSGGGGSGGGGSEPKSSDKTHTCPPCPAPELLGGPSVFLFPPKPKDTLMISRTPEVTCVVVDVSHEDPEVKFNWYVDGVEVHNAKTKPREEQYNSTYRVVSVLTVLHQDWLNGKEYKCKVSNKALPAPIEKTISKAKGQPREPQVYTLPPCREEMTKNQVSLWCLVKGFYPSDIAVEWESNGQPENNYKTTPPVLDSDGSFFLYSKLTVDKSRWQQGNVFSCSVMHEALHNHYTQKSLSLSPGK

SEQ ID NO: 757 - protein, 447 aa, synthetic construct
  REGION 1..447: note = LIM01 HC
EIQLQQSGPELMKPGASVKISCKASTYSFTRYFMHWVKQSHGECLEWIGYIDPFNGGTGYNQKFKGKATLTVDKSSSTAYMHLSSLTSEDSAVYYCVTYGSDYFDYWGQGTTLTVSSASTKGPSVFPLAPSSKSTSGGTAALGCLVKDYFPEPVTVSWNSGALTSGVHTFPAVLQSSGLYSLSSVVTVPSSSLGTQTYICNVNHKPSNTKVDKKVEPKSCDKTHTCPPCPAPELLGGPSVFLFPPKPKDTLMISRTPEVTCVVVDVSHEDPEVKFNWYVDGVEVHNAKTKPREEQYNSTYRVVSVLTVLHQDWLNGKEYKCKVSNKALPAPIEKTISKAKGQPREPQVYTLPPCREEMTKNQVSLWCLVKGFYPSDIAVEWESNGQPENNYKTTPPVLDSDGSFFLYSKLTVDKSRWQQGNVFSCSVMHEALHNHYTQKSLSLSPGK

SEQ ID NO: 758 - protein, 461 aa, synthetic construct
  REGION 1..461: note = LIM01 LC
DIVMTQPQKFMSTSVGDRVSVTCKASQNVETDVVWYQQKPGQPPKALIYSASYRHSGVPDRFTGSGSGTNFTLTISTVQSEDLAEYFCQQYNNYPFTFGCGTKLEIKRTVAAPSVFIFPPSDEQLKSGTASVVCLLNNFYPREAKVQWKVDNALQSGNSQESVTEQDSKDSTYSLSSTLTLSKADYEKHKVYACEVTHQGLSSPVTKSFNRGECGGGGSGGGGSGGGGSEPKSSDKTHTCPPCPAPELLGGPSVFLFPPKPKDTLMISRTPEVTCVVVDVSHEDPEVKFNWYVDGVEVHNAKTKPREEQYNSTYRVVSVLTVLHQDWLNGKEYKCKVSNKALPAPIEKTISKAKGQPREPQVYTLPPCREEMTKNQVSLWCLVKGFYPSDIAVEWESNGQPENNYKTTPPVLDSDGSFFLYSKLTVDKSRWQQGNVFSCSVMHEALHNHYTQKSLSLSPGK

SEQ ID NO: 759 - DNA, 1353 bp, synthetic construct
  source 1..1353: mol_type = other DNA
  misc_feature 1..1353: note = nucleotide sequence coding HC of T01
caggtgcagctccagcagtctggttccgagctgaagaaacctggggcttcagtcaaagtctcttgcaaggcttcaggttacactttcaccaattatggtatgaactgggtcaagcaagctcctggtcagtgtttgaagtggatggggtggataaacacatatactggcgaacctacatacaccgacgacttcaagggacgcttcgccttctctcttgacacaagtgtctcaacagcatatctccaaatcagtagccttaaggccgacgacacagcagtttatttttgcgctaggggtggattcggatcttcttactggtatttcgatgtctggggacaaggaagtctggtcacagtttccagcgctagcaccaaaggacctagtgtttttcctcttgccccttcctcaaagtctacctctggggggacagccgctctgggctgcctggtcaaggattatttcccagagcctgtcactgtcagttggaactctggagccttgacttctggtgttcatacatttcctgctgtccttcaaagcagcggcttgtactcattgtcttctgttgtgacagtaccctcaagcagcctcggcactcagacatacatctgcaatgtcaaccacaaaccctcaaatacaaaggtagataaaaaagtcgaaccaaagtcttgtgacaaaactcacacgtgcccaccgtgcccagcacctgaactcctggggggaccgtcagtcttcctcttccccccaaaacccaaggacaccctcatgatctcccggacccctgaggtcacatgcgtggtggtggacgtgagccacgaagaccctgaggtcaagttcaactggtacgtggacggcgtggaggtgcataatgccaagacaaagccgcgggaggagcagtacaacagcacgtaccgtgtggtcagcgtcctcaccgtcctgcaccaggactggctgaatggcaaggagtacaagtgcaaggtctccaacaaagccctcccagcccccatcgagaaaaccatctccaaagccaaagggcagccccgagaaccacaggtgtacaccctgcccccatgccgggaggagatgaccaagaaccaggtcagcctgtggtgcctggtcaaaggcttctatcccagcgacatcgccgtggagtgggagagcaatgggcagccggagaacaactacaagaccacgcctcccgtgctggactccgacggctccttcttcctctacagcaagctcaccgtggacaagagcaggtggcagcaggggaacgtcttctcatgctccgtgatgcatgaggctctgcacaaccactacacgcagaagagcctctccctgtctccgggtaaa

SEQ ID NO: 760 - DNA, 1383 bp, synthetic construct
  source 1..1383: mol_type = other DNA
  misc_feature 1..1383: note = nucleotide sequence coding LC of T01
gacatacaactcacacaatctccctcttctttgtcagcttccgttggggacagggtgtcaattacttgcaaagcctctcaagatgtttctatagctgtagcctggtatcaacagaaacccggaaaagctcccaagttgttgatttatagtgctagttataggtacactggcgtgccagatagattcagtggtagcggttctgggaccgactttaccttgactatttcttccctgcaacctgaggattttgccgtttactattgccaacaacattatattactccccttacttttgggtgtgggaccaaggtagaaatcaagcgtacggtggcagctcccagcgtttttatctttcccccatccgacgagcagctcaagagtggcactgcctctgtagtttgtttgctgaataacttctatccacgtgaagcaaaagtacagtggaaggtcgataatgcccttcagagcggtaacagccaagaaagtgttaccgagcaagattccaaagattccacttacagtctgtccagcacattgacactgagtaaggctgattacgaaaaacacaaggtgtacgcatgcgaggtgacacaccaaggtctttcatctcctgtaactaagagctttaaccggggagaatgtggtggtgggggcagcgggggcggaggtagtggaggcggcggtagtgaaccaaagagtagtgacaaaactcacacgtgcccaccgtgcccagcacctgaactcctggggggaccgtcagtcttcctcttccccccaaaacccaaggacaccctcatgatctcccggacccctgaggtcacatgcgtggtggtggacgtgagccacgaagaccctgaggtcaagttcaactggtacgtggacggcgtggaggtgcataatgccaagacaaagccgcgggaggagcagtacaacagcacgtaccgtgtggtcagcgtcctcaccgtcctgcaccaggactggctgaatggcaaggagtacaagtgcaaggtctccaacaaagccctcccagcccccatcgagaaaaccatctccaaagccaaagggcagccccgagaaccacaggtgtacaccctgcccccatgccgggaggagatgaccaagaaccaggtcagcctgtggtgcctggtcaaaggcttctatcccagcgacatcgccgtggagtgggagagcaatgggcagccggagaacaactacaagaccacgcctcccgtgctggactccgacggctccttcttcctctacagcaagctcaccgtggacaagagcaggtggcagcaggggaacgtcttctcatgctccgtgatgcatgaggctctgcacaaccactacacgcagaagagcctctccctgtctccgggtaaa

SEQ ID NO: 761 - DNA, 1347 bp, synthetic construct
  source 1..1347: mol_type = other DNA
  misc_feature 1..1347: note = nucleotide sequence coding HC of MSM01
caggttcaattgcagcagtctggaccagaattggagaagcctggcgcaagcgtcaaaatatcttgcaaggcttcaggttacagtttcaccggatacactatgaactgggtcaagcaaagccacggcaagtgtcttgaatggataggattgattactccatacaatggcgcttcatcatacaatcagaagtttaggggcaaggcaactttgaccgtggataagtcatcatctaccgcatatatggacctcttgagcctcacaagtgaagactcagctgtttacttttgtgccagaggagggtatgatgggcgaggattcgactattggggtcaaggaaccaccgtgacagtaagctctgctagcaccaaaggacctagtgtttttcctcttgccccttcctcaaagtctacctctggggggacagccgctctgggctgcctggtcaaggattatttcccagagcctgtcactgtcagttggaactctggagccttgacttctggtgttcatacatttcctgctgtccttcaaagcagcggcttgtactcattgtcttctgttgtgacagtaccctcaagcagcctcggcactcagacatacatctgcaatgtcaaccacaaaccctcaaatacaaaggtagataaaaaagtcgaaccaaagtcttgtgacaaaactcacacgtgcccaccgtgcccagcacctgaactcctggggggaccgtcagtcttcctcttccccccaaaacccaaggacaccctcatgatctcccggacccctgaggtcacatgcgtggtggtggacgtgagccacgaagaccctgaggtcaagttcaactggtacgtggacggcgtggaggtgcataatgccaagacaaagccgcgggaggagcagtacaacagcacgtaccgtgtggtcagcgtcctcaccgtcctgcaccaggactggctgaatggcaaggagtacaagtgcaaggtctccaacaaagccctcccagcccccatcgagaaaaccatctccaaagccaaagggcagccccgagaaccacaggtgtacaccctgcccccatgccgggaggagatgaccaagaaccaggtcagcctgtggtgcctggtcaaaggcttctatcccagcgacatcgccgtggagtgggagagcaatgggcagccggagaacaactacaagaccacgcctcccgtgctggactccgacggctccttcttcctctacagcaagctcaccgtggacaagagcaggtggcagcaggggaacgtcttctcatgctccgtgatgcatgaggctctgcacaaccactacacgcagaagagcctctccctgtctccgggtaaa

SEQ ID NO: 762 - DNA, 1380 bp, synthetic construct
  source 1..1380: mol_type = other DNA
  misc_feature 1..1380: note = nucleotide sequence coding LC of MSM01
gacatagagttgactcaatctccagcaatcatgtcagcctcacccggagaaaaggtcaccatgacttgttctgcaagttccagcgtttcttatatgcattggtaccagcagaagtcagggactagccctaagagatggatttacgatacctccaaactggcctccggggtgccaggccggtttagtggcagtggaagcggtaacagctactctttgaccatatctagcgtggaagcagaggacgacgctacttattactgtcaacagtggtctaagcacccactgaccttcggctgtggtacaaagctcgaaataaaacgtacggtggcagctcccagcgtttttatctttcccccatccgacgagcagctcaagagtggcactgcctctgtagtttgtttgctgaataacttctatccacgtgaagcaaaagtacagtggaaggtcgataatgcccttcagagcggtaacagccaagaaagtgttaccgagcaagattccaaagattccacttacagtctgtccagcacattgacactgagtaaggctgattacgaaaaacacaaggtgtacgcatgcgaggtgacacaccaaggtctttcatctcctgtaactaagagctttaaccggggagaatgtggtggtgggggcagcgggggcggaggtagtggaggcggcggtagtgaaccaaagagtagtgacaaaactcacacgtgcccaccgtgcccagcacctgaactcctggggggaccgtcagtcttcctcttccccccaaaacccaaggacaccctcatgatctcccggacccctgaggtcacatgcgtggtggtggacgtgagccacgaagaccctgaggtcaagttcaactggtacgtggacggcgtggaggtgcataatgccaagacaaagccgcgggaggagcagtacaacagcacgtaccgtgtggtcagcgtcctcaccgtcctgcaccaggactggctgaatggcaaggagtacaagtgcaaggtctccaacaaagccctcccagcccccatcgagaaaaccatctccaaagccaaagggcagccccgagaaccacaggtgtacaccctgcccccatgccgggaggagatgaccaagaaccaggtcagcctgtggtgcctggtcaaaggcttctatcccagcgacatcgccgtggagtgggagagcaatgggcagccggagaacaactacaagaccacgcctcccgtgctggactccgacggctccttcttcctctacagcaagctcaccgtggacaagagcaggtggcagcaggggaacgtcttctcatgctccgtgatgcatgaggctctgcacaaccactacacgcagaagagcctctccctgtctccgggtaaa

SEQ ID NO: 763 - DNA, 1341 bp, synthetic construct
  source 1..1341: mol_type = other DNA
  misc_feature 1..1341: note = nucleotide sequence coding HC of LIM01
gagatacagttgcagcaaagcggacccgagcttatgaaaccaggagctagtgtgaaaattagctgcaaggctagcacctactcttttactcgctattttatgcattgggttaaacagtcacatggtgagtgtttggaatggatcgggtacattgatccctttaatggagggactggctacaaccagaagtttaaaggaaaagccactctcactgttgacaaaagtagtagtacagcatatatgcacctcagttcccttaccagtgaagatagcgcagtttactattgtgtcacttacggatcagactacttcgactattggggacagggtacaacccttacagtctccagtgctagcaccaaaggacctagtgtttttcctcttgccccttcctcaaagtctacctctggggggacagccgctctgggctgcctggtcaaggattatttcccagagcctgtcactgtcagttggaactctggagccttgacttctggtgttcatacatttcctgctgtccttcaaagcagcggcttgtactcattgtcttctgttgtgacagtaccctcaagcagcctcggcactcagacatacatctgcaatgtcaaccacaaaccctcaaatacaaaggtagataaaaaagtcgaaccaaagtcttgtgacaaaactcacacgtgcccaccgtgcccagcacctgaactcctggggggaccgtcagtcttcctcttccccccaaaacccaaggacaccctcatgatctcccggacccctgaggtcacatgcgtggtggtggacgtgagccacgaagaccctgaggtcaagttcaactggtacgtggacggcgtggaggtgcataatgccaagacaaagccgcgggaggagcagtacaacagcacgtaccgtgtggtcagcgtcctcaccgtcctgcaccaggactggctgaatggcaaggagtacaagtgcaaggtctccaacaaagccctcccagcccccatcgagaaaaccatctccaaagccaaagggcagccccgagaaccacaggtgtacaccctgcccccatgccgggaggagatgaccaagaaccaggtcagcctgtggtgcctggtcaaaggcttctatcccagcgacatcgccgtggagtgggagagcaatgggcagccggagaacaactacaagaccacgcctcccgtgctggactccgacggctccttcttcctctacagcaagctcaccgtggacaagagcaggtggcagcaggggaacgtcttctcatgctccgtgatgcatgaggctctgcacaaccactacacgcagaagagcctctccctgtctccgggtaaa

SEQ ID NO: 764 - DNA, 1383 bp, synthetic construct
  source 1..1383: mol_type = other DNA
  misc_feature 1..1383: note = nucleotide sequence coding LC of LIM01
gacatagtgatgacccaaccacaaaagtttatgtcaacctccgttggagatcgtgtttctgtcacttgtaaggcatcacagaatgtagagacagacgtagtctggtatcagcagaaacctggtcagccacctaaagcactcatctacagtgcaagttaccgacattctggcgtacccgacagatttactgggtctggttctggtacaaatttcactctcaccatctcaaccgtccaatcagaagacttggccgagtatttttgccagcaatataacaattatccctttacattcggatgtgggaccaaactcgaaatcaaacgtacggtggcagctcccagcgtttttatctttcccccatccgacgagcagctcaagagtggcactgcctctgtagtttgtttgctgaataacttctatccacgtgaagcaaaagtacagtggaaggtcgataatgcccttcagagcggtaacagccaagaaagtgttaccgagcaagattccaaagattccacttacagtctgtccagcacattgacactgagtaaggctgattacgaaaaacacaaggtgtacgcatgcgaggtgacacaccaaggtctttcatctcctgtaactaagagctttaaccggggagaatgtggtggtgggggcagcgggggcggaggtagtggaggcggcggtagtgaaccaaagagtagtgacaaaactcacacgtgcccaccgtgcccagcacctgaactcctggggggaccgtcagtcttcctcttccccccaaaacccaaggacaccctcatgatctcccggacccctgaggtcacatgcgtggtggtggacgtgagccacgaagaccctgaggtcaagttcaactggtacgtggacggcgtggaggtgcataatgccaagacaaagccgcgggaggagcagtacaacagcacgtaccgtgtggtcagcgtcctcaccgtcctgcaccaggactggctgaatggcaaggagtacaagtgcaaggtctccaacaaagccctcccagcccccatcgagaaaaccatctccaaagccaaagggcagccccgagaaccacaggtgtacaccctgcccccatgccgggaggagatgaccaagaaccaggtcagcctgtggtgcctggtcaaaggcttctatcccagcgacatcgccgtggagtgggagagcaatgggcagccggagaacaactacaagaccacgcctcccgtgctggactccgacggctccttcttcctctacagcaagctcaccgtggacaagagcaggtggcagcaggggaacgtcttctcatgctccgtgatgcatgaggctctgcacaaccactacacgcagaagagcctctccctgtctccgggtaaa

SEQ ID NO: 765 - protein, 121 aa, synthetic construct
  REGION 1..121: note = T01-VH
QVQLQQSGSELKKPGASVKVSCKASGYTFTNYGMNWVKQAPGQCLKWMGWINTYTGEPTYTDDFKGRFAFSLDTSVSTAYLQISSLKADDTAVYFCARGGFGSSYWYFDVWGQGSLVTVSS

SEQ ID NO: 766 - protein, 107 aa, synthetic construct
  REGION 1..107: note = TO1-VL
DIQLTQSPSSLSASVGDRVSITCKASQDVSIAVAWYQQKPGKAPKLLIYSASYRYTGVPDRFSGSGSGTDFTLTISSLQPEDFAVYYCQQHYITPLTFGCGTKVEIK

SEQ ID NO: 767 - protein, 119 aa, synthetic construct
  REGION 1..119: note = MSM01-VH
QVQLQQSGPELEKPGASVKISCKASGYSFTGYTMNWVKQSHGKCLEWIGLITPYNGASSYNQKFRGKATLTVDKSSSTAYMDLLSLTSEDSAVYFCARGGYDGRGFDYWGQGTTVTVSS

SEQ ID NO: 768 - protein, 106 aa, synthetic construct
  REGION 1..106: note = MSM01-VL
DIELTQSPAIMSASPGEKVTMTCSASSSVSYMHWYQQKSGTSPKRWIYDTSKLASGVPGRFSGSGSGNSYSLTISSVEAEDDATYYCQQWSKHPLTFGCGTKLEIK

SEQ ID NO: 769 - protein, 117 aa, synthetic construct
  REGION 1..117: note = LIM01-VH
EIQLQQSGPELMKPGASVKISCKASTYSFTRYFMHWVKQSHGECLEWIGYIDPFNGGTGYNQKFKGKATLTVDKSSSTAYMHLSSLTSEDSAVYYCVTYGSDYFDYWGQGTTLTVSS

SEQ ID NO: 770 - protein, 107 aa, synthetic construct
  REGION 1..107: note = LIM01-VL
DIVMTQPQKFMSTSVGDRVSVTCKASQNVETDVVWYQQKPGQPPKALIYSASYRHSGVPDRFTGSGSGTNFTLTISTVQSEDLAEYFCQQYNNYPFTFGCGTKLEIK

SEQ ID NO: 771 - DNA, 363 bp, synthetic construct
  source 1..363: mol_type = other DNA
  misc_feature 1..363: note = nucleotide sequence coding VH of T01
caggtgcagctccagcagtctggttccgagctgaagaaacctggggcttcagtcaaagtctcttgcaaggcttcaggttacactttcaccaattatggtatgaactgggtcaagcaagctcctggtcagtgtttgaagtggatggggtggataaacacatatactggcgaacctacatacaccgacgacttcaagggacgcttcgccttctctcttgacacaagtgtctcaacagcatatctccaaatcagtagccttaaggccgacgacacagcagtttatttttgcgctaggggtggattcggatcttcttactggtatttcgatgtctggggacaaggaagtctggtcacagtttccagc

SEQ ID NO: 772 - DNA, 321 bp, synthetic construct
  source 1..321: mol_type = other DNA
  misc_feature 1..321: note = nucleotide sequence coding VL of T01
gacatacaactcacacaatctccctcttctttgtcagcttccgttggggacagggtgtcaattacttgcaaagcctctcaagatgtttctatagctgtagcctggtatcaacagaaacccggaaaagctcccaagttgttgatttatagtgctagttataggtacactggcgtgccagatagattcagtggtagcggttctgggaccgactttaccttgactatttcttccctgcaacctgaggattttgccgtttactattgccaacaacattatattactccccttacttttgggtgtgggaccaaggtagaaatcaag

SEQ ID NO: 773 - DNA, 357 bp, synthetic construct
  source 1..357: mol_type = other DNA
  misc_feature 1..357: note = nucleotide sequence coding VH of MSM01
caggttcaattgcagcagtctggaccagaattggagaagcctggcgcaagcgtcaaaatatcttgcaaggcttcaggttacagtttcaccggatacactatgaactgggtcaagcaaagccacggcaagtgtcttgaatggataggattgattactccatacaatggcgcttcatcatacaatcagaagtttaggggcaaggcaactttgaccgtggataagtcatcatctaccgcatatatggacctcttgagcctcacaagtgaagactcagctgtttacttttgtgccagaggagggtatgatgggcgaggattcgactattggggtcaaggaaccaccgtgacagtaagctct

SEQ ID NO: 774 - DNA, 318 bp, synthetic construct
  source 1..318: mol_type = other DNA
  misc_feature 1..318: note = nucleotide sequence coding VL of MSM01
gacatagagttgactcaatctccagcaatcatgtcagcctcacccggagaaaaggtcaccatgacttgttctgcaagttccagcgtttcttatatgcattggtaccagcagaagtcagggactagccctaagagatggatttacgatacctccaaactggcctccggggtgccaggccggtttagtggcagtggaagcggtaacagctactctttgaccatatctagcgtggaagcagaggacgacgctacttattactgtcaacagtggtctaagcacccactgaccttcggctgtggtacaaagctcgaaataaaa

SEQ ID NO: 775 - DNA, 351 bp, synthetic construct
  source 1..351: mol_type = other DNA
  misc_feature 1..351: note = nucleotide sequence coding VH of LIM01
gagatacagttgcagcaaagcggacccgagcttatgaaaccaggagctagtgtgaaaattagctgcaaggctagcacctactcttttactcgctattttatgcattgggttaaacagtcacatggtgagtgtttggaatggatcgggtacattgatccctttaatggagggactggctacaaccagaagtttaaaggaaaagccactctcactgttgacaaaagtagtagtacagcatatatgcacctcagttcccttaccagtgaagatagcgcagtttactattgtgtcacttacggatcagactacttcgactattggggacagggtacaacccttacagtctccagt

SEQ ID NO: 776 - DNA, 321 bp, synthetic construct
  source 1..321: mol_type = other DNA
  misc_feature 1..321: note = nucleotide sequence coding VL of LIM01
gacatagtgatgacccaaccacaaaagtttatgtcaacctccgttggagatcgtgtttctgtcacttgtaaggcatcacagaatgtagagacagacgtagtctggtatcagcagaaacctggtcagccacctaaagcactcatctacagtgcaagttaccgacattctggcgtacccgacagatttactgggtctggttctggtacaaatttcactctcaccatctcaaccgtccaatcagaagacttggccgagtatttttgccagcaatataacaattatccctttacattcggatgtgggaccaaactcgaaatcaaa

SEQ ID NO: 777 - protein, 5 aa, synthetic construct
  REGION 1..5: note = VH-CDR1 of MSM01
GYTMN

SEQ ID NO: 778 - protein, 17 aa, synthetic construct
  REGION 1..17: note = VH-CDR2 of MSM01
LITPYNGASSYNQKFRG

SEQ ID NO: 779 - protein, 10 aa, synthetic construct
  REGION 1..10: note = VH-CDR3 of MSM01
GGYDGRGFDY

SEQ ID NO: 780 - protein, 10 aa, synthetic construct
  REGION 1..10: note = VL-CDR1 of MSM01
SASSSVSYMH

SEQ ID NO: 781 - protein, 7 aa, synthetic construct
  REGION 1..7: note = VL-CDR2 of MSM01
DTSKLAS

SEQ ID NO: 782 - protein, 9 aa, synthetic construct
  REGION 1..9: note = VL-CDR3 of MSM01
QQWSKHPLT

SEQ ID NO: 783 - protein, 5 aa, synthetic construct
  REGION 1..5: note = VH-CDR1 of LIM01
RYFMH

SEQ ID NO: 784 - protein, 17 aa, synthetic construct
  REGION 1..17: note = VH-CDR2 of LIM01
YIDPFNGGTGYNQKFKG

SEQ ID NO: 785 - protein, 8 aa, synthetic construct
  REGION 1..8: note = VH-CDR3 of LIM01
YGSDYFDY

SEQ ID NO: 786 - protein, 11 aa, synthetic construct
  REGION 1..11: note = VL-CDR1 of LIM01
KASQNVETDVV

SEQ ID NO: 787 - protein, 7 aa, synthetic construct
  REGION 1..7: note = VL-CDR2 of LIM01
SASYRHS

SEQ ID NO: 788 - protein, 7 aa, synthetic construct
  REGION 1..7: note = VL-CDR3 of LIM01
QQYNNYP

SEQ ID NO: 789 - protein, 227 aa, synthetic construct
  REGION 1..227: note = Fc-Hole-RF
DKTHTCPPCPAPELLGGPSVFLFPPKPKDTLMISRTPEVTCVVVDVSHEDPEVKFNWYVDGVEVHNAKTKPREEQYNSTYRVVSVLTVLHQDWLNGKEYKCKVSNKALPAPIEKTISKAKGQPREPQVCTLPPSREEMTKNQVSLSCAVKGFYPSDIAVEWESNGQPENNYKTTPPVLDSDGSFFLVSKLTVDKSRWQQGNVFSCSVMHEALHNRFTQKSLSLSPGK

SEQ ID NO: 790 - protein, 352 aa, synthetic construct
  REGION 1..352: note = H01Fv1-HC
EVQLVESGGGLVQPGGSLRLSCAASGFNIKDTYIHWVRQAPGKCLEWVARIYPTNGYTRYADSVKGRFTISADTSKNTAYLQMNSLRAEDTAVYYCSRWGGDGFYAMDYWGQGTLVTVSSEPKSCDKTHTCPPCPAPELLGGPSVFLFPPKPKDTLMISRTPEVTCVVVDVSHEDPEVKFNWYVDGVEVHNAKTKPREEQYNSTYRVVSVLTVLHQDWLNGKEYKCKVSNKALPAPIEKTISKAKGQPREPQVYTLPPCREEMTKNQVSLWCLVKGFYPSDIAVEWESNGQPENNYKTTPPVLDSDGSFFLYSKLTVDKSRWQQGNVFSCSVMHEALHNHYTQKSLSLSPGK

SEQ ID NO: 791 - protein, 340 aa, synthetic construct
  REGION 1..340: note = H01Fv1-LC
DIQMTQSPSSLSASVGDRVTITCRASQDVNTAVAWYQQKPGKAPKLLIYSASFLYSGVPSRFSGSRSGTDFTLTISSLQPEDFATYYCQQHYTTPPTFGCGTKVEIKREPKSCDKTHTCPPCPAPELLGGPSVFLFPPKPKDTLMISRTPEVTCVVVDVSHEDPEVKFNWYVDGVEVHNAKTKPREEQYNSTYRVVSVLTVLHQDWLNGKEYKCKVSNKALPAPIEKTISKAKGQPREPQVYTLPPCREEMTKNQVSLWCLVKGFYPSDIAVEWESNGQPENNYKTTPPVLDSDGSFFLYSKLTVDKSRWQQGNVFSCSVMHEALHNHYTQKSLSLSPGK

SEQ ID NO: 792 - protein, 352 aa, synthetic construct
  REGION 1..352: note = H01Fv2-HC
EVQLVESGGGLVQPGGSLRLSCAASGFNIKDTYIHWVRQAPGKGLEWVARIYPTNGYTRYADSVKGRFTISADTSKNTAYLQMNSLRAEDTAVYYCSRWGGDGFYAMDYWGCGTLVTVSSEPKSCDKTHTCPPCPAPELLGGPSVFLFPPKPKDTLMISRTPEVTCVVVDVSHEDPEVKFNWYVDGVEVHNAKTKPREEQYNSTYRVVSVLTVLHQDWLNGKEYKCKVSNKALPAPIEKTISKAKGQPREPQVYTLPPCREEMTKNQVSLWCLVKGFYPSDIAVEWESNGQPENNYKTTPPVLDSDGSFFLYSKLTVDKSRWQQGNVFSCSVMHEALHNHYTQKSLSLSPGK

SEQ ID NO: 793 - protein, 340 aa, synthetic construct
  REGION 1..340: note = H01Fv2-LC
DIQMTQSPSSLSASVGDRVTITCRASQDVNTAVAWYQQKPGKCPKLLIYSASFLYSGVPSRFSGSRSGTDFTLTISSLQPEDFATYYCQQHYTTPPTFGQGTKVEIKREPKSCDKTHTCPPCPAPELLGGPSVFLFPPKPKDTLMISRTPEVTCVVVDVSHEDPEVKFNWYVDGVEVHNAKTKPREEQYNSTYRVVSVLTVLHQDWLNGKEYKCKVSNKALPAPIEKTISKAKGQPREPQVYTLPPCREEMTKNQVSLWCLVKGFYPSDIAVEWESNGQPENNYKTTPPVLDSDGSFFLYSKLTVDKSRWQQGNVFSCSVMHEALHNHYTQKSLSLSPGK

SEQ ID NO: 794 - protein, 365 aa, synthetic construct
  REGION 1..365: note = H01Fv3-HC
EVQLVESGGGLVQPGGSLRLSCAASGFNIKDTYIHWVRQAPGKGLEWVARIYPTNGYTRYADSVKGRFTISADTSKNTAYLQMNSLRAEDTAVYYCSRWGGDGFYAMDYWGQGTLVTVSSASTKGPSVCPLAPEPKSCDKTHTCPPCPAPELLGGPSVFLFPPKPKDTLMISRTPEVTCVVVDVSHEDPEVKFNWYVDGVEVHNAKTKPREEQYNSTYRVVSVLTVLHQDWLNGKEYKCKVSNKALPAPIEKTISKAKGQPREPQVYTLPPCREEMTKNQVSLWCLVKGFYPSDIAVEWESNGQPENNYKTTPPVLDSDGSFFLYSKLTVDKSRWQQGNVFSCSVMHEALHNHYTQKSLSLSPGK

SEQ ID NO: 795 - protein, 357 aa, synthetic construct
  REGION 1..357: note = H01Fv3-LC
DIQMTQSPSSLSASVGDRVTITCRASQDVNTAVAWYQQKPGKAPKLLIYSASFLYSGVPSRFSGSRSGTDFTLTISSLQPEDFATYYCQQHYTTPPTFGQGTKVEIKRTVAAPSVFIFPPCGGGSEPKSCDKTHTCPPCPAPELLGGPSVFLFPPKPKDTLMISRTPEVTCVVVDVSHEDPEVKFNWYVDGVEVHNAKTKPREEQYNSTYRVVSVLTVLHQDWLNGKEYKCKVSNKALPAPIEKTISKAKGQPREPQVYTLPPCREEMTKNQVSLWCLVKGFYPSDIAVEWESNGQPENNYKTTPPVLDSDGSFFLYSKLTVDKSRWQQGNVFSCSVMHEALHNHYTQKSLSLSPGK

SEQ ID NO: 796 - protein, 365 aa, synthetic construct
  REGION 1..365: note = H01Fv4-HC
EVQLVESGGGLVQPGGSLRLSCAASGFNIKDTYIHWVRQAPGKCLEWVARIYPTNGYTRYADSVKGRFTISADTSKNTAYLQMNSLRAEDTAVYYCSRWGGDGFYAMDYWGCGTLVTVSSASTKGPSVCPLAPEPKSCDKTHTCPPCPAPELLGGPSVFLFPPKPKDTLMISRTPEVTCVVVDVSHEDPEVKFNWYVDGVEVHNAKTKPREEQYNSTYRVVSVLTVLHQDWLNGKEYKCKVSNKALPAPIEKTISKAKGQPREPQVYTLPPCREEMTKNQVSLWCLVKGFYPSDIAVEWESNGQPENNYKTTPPVLDSDGSFFLYSKLTVDKSRWQQGNVFSCSVMHEALHNHYTQKSLSLSPGK

SEQ ID NO: 797 - protein, 340 aa, synthetic construct
  REGION 1..340: note = H01Fv4-LC
DIQMTQSPSSLSASVGDRVTITCRASQDVNTAVAWYQQKPGKCPKLLIYSASFLYSGVPSRFSGSRSGTDFTLTISSLQPEDFATYYCQQHYTTPPTFGCGTKVEIKREPKSCDKTHTCPPCPAPELLGGPSVFLFPPKPKDTLMISRTPEVTCVVVDVSHEDPEVKFNWYVDGVEVHNAKTKPREEQYNSTYRVVSVLTVLHQDWLNGKEYKCKVSNKALPAPIEKTISKAKGQPREPQVYTLPPCREEMTKNQVSLWCLVKGFYPSDIAVEWESNGQPENNYKTTPPVLDSDGSFFLYSKLTVDKSRWQQGNVFSCSVMHEALHNHYTQKSLSLSPGK

SEQ ID NO: 798 - protein, 365 aa, synthetic construct
  REGION 1..365: note = H01Fv5-HC
EVQLVESGGGLVQPGGSLRLSCAASGFNIKDTYIHWVRQAPGKCLEWVARIYPTNGYTRYADSVKGRFTISADTSKNTAYLQMNSLRAEDTAVYYCSRWGGDGFYAMDYWGQGTLVTVSSASTKGPSVCPLAPEPKSCDKTHTCPPCPAPELLGGPSVFLFPPKPKDTLMISRTPEVTCVVVDVSHEDPEVKFNWYVDGVEVHNAKTKPREEQYNSTYRVVSVLTVLHQDWLNGKEYKCKVSNKALPAPIEKTISKAKGQPREPQVYTLPPCREEMTKNQVSLWCLVKGFYPSDIAVEWESNGQPENNYKTTPPVLDSDGSFFLYSKLTVDKSRWQQGNVFSCSVMHEALHNHYTQKSLSLSPGK

SEQ ID NO: 799 - protein, 357 aa, synthetic construct
  REGION 1..357: note = H01Fv5-LC
DIQMTQSPSSLSASVGDRVTITCRASQDVNTAVAWYQQKPGKAPKLLIYSASFLYSGVPSRFSGSRSGTDFTLTISSLQPEDFATYYCQQHYTTPPTFGCGTKVEIKRTVAAPSVFIFPPCGGGSEPKSCDKTHTCPPCPAPELLGGPSVFLFPPKPKDTLMISRTPEVTCVVVDVSHEDPEVKFNWYVDGVEVHNAKTKPREEQYNSTYRVVSVLTVLHQDWLNGKEYKCKVSNKALPAPIEKTISKAKGQPREPQVYTLPPCREEMTKNQVSLWCLVKGFYPSDIAVEWESNGQPENNYKTTPPVLDSDGSFFLYSKLTVDKSRWQQGNVFSCSVMHEALHNHYTQKSLSLSPGK

SEQ ID NO: 800 - protein, 365 aa, synthetic construct
  REGION 1..365: note = H01Fv6-HC
EVQLVESGGGLVQPGGSLRLSCAASGFNIKDTYIHWVRQAPGKGLEWVARIYPTNGYTRYADSVKGRFTISADTSKNTAYLQMNSLRAEDTAVYYCSRWGGDGFYAMDYWGCGTLVTVSSASTKGPSVCPLAPEPKSCDKTHTCPPCPAPELLGGPSVFLFPPKPKDTLMISRTPEVTCVVVDVSHEDPEVKFNWYVDGVEVHNAKTKPREEQYNSTYRVVSVLTVLHQDWLNGKEYKCKVSNKALPAPIEKTISKAKGQPREPQVYTLPPCREEMTKNQVSLWCLVKGFYPSDIAVEWESNGQPENNYKTTPPVLDSDGSFFLYSKLTVDKSRWQQGNVFSCSVMHEALHNHYTQKSLSLSPGK

SEQ ID NO: 801 - protein, 357 aa, synthetic construct
  REGION 1..357: note = H01Fv6-LC
DIQMTQSPSSLSASVGDRVTITCRASQDVNTAVAWYQQKPGKCPKLLIYSASFLYSGVPSRFSGSRSGTDFTLTISSLQPEDFATYYCQQHYTTPPTFGQGTKVEIKRTVAAPSVFIFPPCGGGSEPKSCDKTHTCPPCPAPELLGGPSVFLFPPKPKDTLMISRTPEVTCVVVDVSHEDPEVKFNWYVDGVEVHNAKTKPREEQYNSTYRVVSVLTVLHQDWLNGKEYKCKVSNKALPAPIEKTISKAKGQPREPQVYTLPPCREEMTKNQVSLWCLVKGFYPSDIAVEWESNGQPENNYKTTPPVLDSDGSFFLYSKLTVDKSRWQQGNVFSCSVMHEALHNHYTQKSLSLSPGK

SEQ ID NO: 802 - protein, 365 aa, synthetic construct; identical to SEQ ID NO: 796
  REGION 1..365: note = H01Fv7-HC

SEQ ID NO: 803 - protein, 357 aa, synthetic construct
  REGION 1..357: note = H01Fv7-LC
DIQMTQSPSSLSASVGDRVTITCRASQDVNTAVAWYQQKPGKCPKLLIYSASFLYSGVPSRFSGSRSGTDFTLTISSLQPEDFATYYCQQHYTTPPTFGCGTKVEIKRTVAAPSVFIFPPCGGGSEPKSCDKTHTCPPCPAPELLGGPSVFLFPPKPKDTLMISRTPEVTCVVVDVSHEDPEVKFNWYVDGVEVHNAKTKPREEQYNSTYRVVSVLTVLHQDWLNGKEYKCKVSNKALPAPIEKTISKAKGQPREPQVYTLPPCREEMTKNQVSLWCLVKGFYPSDIAVEWESNGQPENNYKTTPPVLDSDGSFFLYSKLTVDKSRWQQGNVFSCSVMHEALHNHYTQKSLSLSPGK

SEQ ID NO: 804 - DNA, 681 bp, synthetic construct
  source 1..681: mol_type = other DNA
  misc_feature 1..681: note = Fc-Hole-RF
gacaaaactcacacatgcccaccgtgcccagcacctgaactcctggggggaccgtcagtcttcctcttccccccaaaacccaaggacaccctcatgatctcccggacccctgaggtcacatgcgtggtggtggacgtgagccacgaagaccctgaggtcaagttcaactggtacgtggacggcgtggaggtgcataatgccaagacaaagccgcgggaggagcagtacaacagcacgtaccgtgtggtcagcgtcctcaccgtcctgcaccaggactggctgaatggcaaggagtacaagtgcaaggtctccaacaaagccctcccagcccccatcgagaaaaccatctccaaagccaaagggcagccccgagaaccacaggtgtgcaccctgcccccatcccgggaggagatgaccaagaaccaggtcagcctgagctgcgcggtcaaaggcttctatcccagcgacatcgccgtggagtgggagagcaatgggcagccggagaacaactacaagaccacgcctcccgtgctggactccgacggctccttcttcctcgtgagcaagctcaccgtggacaagagcaggtggcagcaggggaacgtcttctcatgctccgtgatgcatgaggctctgcacaacagatttacgcagaagagcctctccctgtctccgggtaaa

SEQ ID NO: 805 - DNA, 1056 bp, synthetic construct
  source 1..1056: mol_type = other DNA
  misc_feature 1..1056: note = H01Fv1-HC
gaagttcaacttgtggagtctggaggcggtttggtacaacctggaggttcacttcgtttgtcatgtgctgcctctgggtttaatatcaaggatacttatattcattgggttcgccaggcacccggaaaatgcctggaatgggtggcccgtatatatcccactaacggttacactcgatatgctgactctgtaaagggtcgatttactatatccgctgatactagcaaaaacactgcctacctccagatgaacagtctgcgcgccgaggatacagcagtttattattgttcccgatggggaggtgacgggttctatgccatggactactggggtcaagggacactggtaaccgtttcttctgaaccaaagtcttgtgacaaaactcacacgtgcccaccgtgcccagcacctgaactcctggggggaccgtcagtcttcctcttccccccaaaacccaaggacaccctcatgatctcccggacccctgaggtcacatgcgtggtggtggacgtgagccacgaagaccctgaggtcaagttcaactggtacgtggacggcgtggaggtgcataatgccaagacaaagccgcgggaggagcagtacaacagcacgtaccgtgtggtcagcgtcctcaccgtcctgcaccaggactggctgaatggcaaggagtacaagtgcaaggtctccaacaaagccctcccagcccccatcgagaaaaccatctccaaagccaaagggcagccccgagaaccacaggtgtacaccctgcccccatgccgggaggagatgaccaagaaccaggtcagcctgtggtgcctggtcaaaggcttctatcccagcgacatcgccgtggagtgggagagcaatgggcagccggagaacaactacaagaccacgcctcccgtgctggactccgacggctccttcttcctctacagcaagctcaccgtggacaagagcaggtggcagcaggggaacgtcttctcatgctccgtgatgcatgaggctctgcacaaccactacacgcagaagagcctctccctgtctccgggtaaa

SEQ ID NO: 806 - DNA, 1020 bp, synthetic construct
  source 1..1020: mol_type = other DNA
  misc_feature 1..1020: note = H01Fv1-LC
gacattcagatgacccaatccccctctagcctttcagcctccgtaggggacagagttacaataacctgtagggctagtcaggacgttaatacagcagtcgcatggtaccagcagaagcccggtaaggctcctaagcttttgatctacagtgcttctttcctgtattctggtgtacctagccgattctcaggctctcggagtggcacagacttcactctgacaatttcaagtctccagccagaagattttgcaacctactactgccaacaacactacactactcctccaaccttcggatgtggcacaaaagtagagattaagcgtgaaccaaagtcttgtgacaaaactcacacgtgcccaccgtgcccagcacctgaactcctggggggaccgtcagtcttcctcttccccccaaaacccaaggacaccctcatgatctcccggacccctgaggtcacatgcgtggtggtggacgtgagccacgaagaccctgaggtcaagttcaactggtacgtggacggcgtggaggtgcataatgccaagacaaagccgcgggaggagcagtacaacagcacgtaccgtgtggtcagcgtcctcaccgtcctgcaccaggactggctgaatggcaaggagtacaagtgcaaggtctccaacaaagccctcccagcccccatcgagaaaaccatctccaaagccaaagggcagccccgagaaccacaggtgtacaccctgcccccatgccgggaggagatgaccaagaaccaggtcagcctgtggtgcctggtcaaaggcttctatcccagcgacatcgccgtggagtgggagagcaatgggcagccggagaacaactacaagaccacgcctcccgtgctggactccgacggctccttcttcctctacagcaagctcaccgtggacaagagcaggtggcagcaggggaacgtcttctcatgctccgtgatgcatgaggctctgcacaaccactacacgcagaagagcctctccctgtctccgggtaaa

SEQ ID NO: 807 - DNA, 1056 bp, synthetic construct
  source 1..1056: mol_type = other DNA
  misc_feature 1..1056: note = H01Fv2-HC
gaagttcaacttgtggagtctggaggcggtttggtacaacctggaggttcacttcgtttgtcatgtgctgcctctgggtttaatatcaaggatacttatattcattgggttcgccaggcacccggaaaagggctggaatgggtggcccgtatatatcccactaacggttacactcgatatgctgactctgtaaagggtcgatttactatatccgctgatactagcaaaaacactgcctacctccagatgaacagtctgcgcgccgaggatacagcagtttattattgttcccgatggggaggtgacgggttctatgccatggactactggggttgtgggacactggtaaccgtttcttctgaaccaaagtcttgtgacaaaactcacacgtgcccaccgtgcccagcacctgaactcctggggggaccgtcagtcttcctcttccccccaaaacccaaggacaccctcatgatctcccggacccctgaggtcacatgcgtggtggtggacgtgagccacgaagaccctgaggtcaagttcaactggtacgtggacggcgtggaggtgcataatgccaagacaaagccgcgggaggagcagtacaacagcacgtaccgtgtggtcagcgtcctcaccgtcctgcaccaggactggctgaatggcaaggagtacaagtgcaaggtctccaacaaagccctcccagcccccatcgagaaaaccatctccaaagccaaagggcagccccgagaaccacaggtgtacaccctgcccccatgccgggaggagatgaccaagaaccaggtcagcctgtggtgcctggtcaaaggcttctatcccagcgacatcgccgtggagtgggagagcaatgggcagccggagaacaactacaagaccacgcctcccgtgctggactccgacggctccttcttcctctacagcaagctcaccgtggacaagagcaggtggcagcaggggaacgtcttctcatgctccgtgatgcatgaggctctgcacaaccactacacgcagaagagcctctccctgtctccgggtaaa

SEQ ID NO: 808 - DNA, 1020 bp, synthetic construct
  source 1..1020: mol_type = other DNA
  misc_feature 1..1020: note = H01Fv2-LC
gacattcagatgacccaatccccctctagcctttcagcctccgtaggggacagagttacaataacctgtagggctagtcaggacgttaatacagcagtcgcatggtaccagcagaagcccggtaagtgtcctaagcttttgatctacagtgcttctttcctgtattctggtgtacctagccgattctcaggctctcggagtggcacagacttcactctgacaatttcaagtctccagccagaagattttgcaacctactactgccaacaacactacactactcctccaaccttcggacagggcacaaaagtagagattaagcgtgaaccaaagtcttgtgacaaaactcacacgtgcccaccgtgcccagcacctgaactcctggggggaccgtcagtcttcctcttccccccaaaacccaaggacaccctcatgatctcccggacccctgaggtcacatgcgtggtggtggacgtgagccacgaagaccctgaggtcaagttcaactggtacgtggacggcgtggaggtgcataatgccaagacaaagccgcgggaggagcagtacaacagcacgtaccgtgtggtcagcgtcctcaccgtcctgcaccaggactggctgaatggcaaggagtacaagtgcaaggtctccaacaaagccctcccagcccccatcgagaaaaccatctccaaagccaaagggcagccccgagaaccacaggtgtacaccctgcccccatgccgggaggagatgaccaagaaccaggtcagcctgtggtgcctggtcaaaggcttctatcccagcgacatcgccgtggagtgggagagcaatgggcagccggagaacaactacaagaccacgcctcccgtgctggactccgacggctccttcttcctctacagcaagctcaccgtggacaagagcaggtggcagcaggggaacgtcttctcatgctccgtgatgcatgaggctctgcacaaccactacacgcagaagagcctctccctgtctccgggtaaa

SEQ ID NO: 809 - DNA, 1095 bp, synthetic construct
  source 1..1095: mol_type = other DNA
  misc_feature 1..1095: note = H01Fv3-HC
gaagttcaacttgtggagtctggaggcggtttggtacaacctggaggttcacttcgtttgtcatgtgctgcctctgggtttaatatcaaggatacttatattcattgggttcgccaggcacccggaaaagggctggaatgggtggcccgtatatatcccactaacggttacactcgatatgctgactctgtaaagggtcgatttactatatccgctgatactagcaaaaacactgcctacctccagatgaacagtctgcgcgccgaggatacagcagtttattattgttcccgatggggaggtgacgggttctatgccatggactactggggtcaagggacactggtaaccgtttcttctgctagcaccaaaggacctagtgtttgtcctcttgcccctgaaccaaagtcttgtgacaaaactcacacgtgcccaccgtgcccagcacctgaactcctggggggaccgtcagtcttcctcttccccccaaaacccaaggacaccctcatgatctcccggacccctgaggtcacatgcgtggtggtggacgtgagccacgaagaccctgaggtcaagttcaactggtacgtggacggcgtggaggtgcataatgccaagacaaagccgcgggaggagcagtacaacagcacgtaccgtgtggtcagcgtcctcaccgtcctgcaccaggactggctgaatggcaaggagtacaagtgcaaggtctccaacaaagccctcccagcccccatcgagaaaaccatctccaaagccaaagggcagccccgagaaccacaggtgtacaccctgcccccatgccgggaggagatgaccaagaaccaggtcagcctgtggtgcctggtcaaaggcttctatcccagcgacatcgccgtggagtgggagagcaatgggcagccggagaacaactacaagaccacgcctcccgtgctggactccgacggctccttcttcctctacagcaagctcaccgtggacaagagcaggtggcagcaggggaacgtcttctcatgctccgtgatgcatgaggctctgcacaaccactacacgcagaagagcctctccctgtctccgggtaaa

SEQ ID NO: 810 - DNA, 1071 bp, synthetic construct
  source 1..1071: mol_type = other DNA
  misc_feature 1..1071: note = H01Fv3-LC
gacattcagatgacccaatccccctctagcctttcagcctccgtaggggacagagttacaataacctgtagggctagtcaggacgttaatacagcagtcgcatggtaccagcagaagcccggtaaggctcctaagcttttgatctacagtgcttctttcctgtattctggtgtacctagccgattctcaggctctcggagtggcacagacttcactctgacaatttcaagtctccagccagaagattttgcaacctactactgccaacaacactacactactcctccaaccttcggacagggcacaaaagtagagattaagcgtacggtggcagctcccagcgtttttatctttcccccatgtggaggtggaagtgaaccaaagtcttgtgacaaaactcacacgtgcccaccgtgcccagcacctgaactcctggggggaccgtcagtcttcctcttccccccaaaacccaaggacaccctcatgatctcccggacccctgaggtcacatgcgtggtggtggacgtgagccacgaagaccctgaggtcaagttcaactggtacgtggacggcgtggaggtgcataatgccaagacaaagccgcgggaggagcagtacaacagcacgtaccgtgtggtcagcgtcctcaccgtcctgcaccaggactggctgaatggcaaggagtacaagtgcaaggtctccaacaaagccctcccagcccccatcgagaaaaccatctccaaagccaaagggcagccccgagaaccacaggtgtacaccctgcccccatgccgggaggagatgaccaagaaccaggtcagcctgtggtgcctggtcaaaggcttctatcccagcgacatcgccgtggagtgggagagcaatgggcagccggagaacaactacaagaccacgcctcccgtgctggactccgacggctccttcttcctctacagcaagctcaccgtggacaagagcaggtggcagcaggggaacgtcttctcatgctccgtgatgcatgaggctctgcacaaccactacacgcagaagagcctctccctgtctccgggtaaa

SEQ ID NO: 811 - DNA, 1095 bp, synthetic construct
  source 1..1095: mol_type = other DNA
  misc_feature 1..1095: note = H01Fv4-HC
gaagttcaacttgtggagtctggaggcggtttggtacaacctggaggttcacttcgtttgtcatgtgctgcctctgggtttaatatcaaggatacttatattcattgggttcgccaggcacccggaaaatgcctggaatgggtggcccgtatatatcccactaacggttacactcgatatgctgactctgtaaagggtcgatttactatatccgctgatactagcaaaaacactgcctacctccagatgaacagtctgcgcgccgaggatacagcagtttattattgttcccgatggggaggtgacgggttctatgccatggactactggggttgtgggacactggtaaccgtttcttctgctagcaccaaaggacctagtgtttgtcctcttgcccctgaaccaaagtcttgtgacaaaactcacacgtgcccaccgtgcccagcacctgaactcctggggggaccgtcagtcttcctcttccccccaaaacccaaggacaccctcatgatctcccggacccctgaggtcacatgcgtggtggtggacgtgagccacgaagaccctgaggtcaagttcaactggtacgtggacggcgtggaggtgcataatgccaagacaaagccgcgggaggagcagtacaacagcacgtaccgtgtggtcagcgtcctcaccgtcctgcaccaggactggctgaatggcaaggagtacaagtgcaaggtctccaacaaagccctcccagcccccatcgagaaaaccatctccaaagccaaagggcagccccgagaaccacaggtgtacaccctgcccccatgccgggaggagatgaccaagaaccaggtcagcctgtggtgcctggtcaaaggcttctatcccagcgacatcgccgtggagtgggagagcaatgggcagccggagaacaactacaagaccacgcctcccgtgctggactccgacggctccttcttcctctacagcaagctcaccgtggacaagagcaggtggcagcaggggaacgtcttctcatgctccgtgatgcatgaggctctgcacaaccactacacgcagaagagcctctccctgtctccgggtaaa

SEQ ID NO: 812 - DNA, 1020 bp, synthetic construct
  source 1..1020: mol_type = other DNA
  misc_feature 1..1020: note = H01Fv4-LC
gacattcagatgacccaatccccctctagcctttcagcctccgtaggggacagagttacaataacctgtagggctagtcaggacgttaatacagcagtcgcatggtaccagcagaagcccggtaagtgtcctaagcttttgatctacagtgcttctttcctgtattctggtgtacctagccgattctcaggctctcggagtggcacagacttcactctgacaatttcaagtctccagccagaagattttgcaacctactactgccaacaacactacactactcctccaaccttcggatgtggcacaaaagtagagattaagcgtgaaccaaagtcttgtgacaaaactcacacgtgcccaccgtgcccagcacctgaactcctggggggaccgtcagtcttcctcttccccccaaaacccaaggacaccctcatgatctcccggacccctgaggtcacatgcgtggtggtggacgtgagccacgaagaccctgaggtcaagttcaactggtacgtggacggcgtggaggtgcataatgccaagacaaagccgcgggaggagcagtacaacagcacgtaccgtgtggtcagcgtcctcaccgtcctgcaccaggactggctgaatggcaaggagtacaagtgcaaggtctccaacaaagccctcccagcccccatcgagaaaaccatctccaaagccaaagggcagccccgagaaccacaggtgtacaccctgcccccatgccgggaggagatgaccaagaaccaggtcagcctgtggtgcctggtcaaaggcttctatcccagcgacatcgccgtggagtgggagagcaatgggcagccggagaacaactacaagaccacgcctcccgtgctggactccgacggctccttcttcctctacagcaagctcaccgtggacaagagcaggtggcagcaggggaacgtcttctcatgctccgtgatgcatgaggctctgcacaaccactacacgcagaagagcctctccctgtctccgggtaaa

SEQ ID NO: 813 - DNA, 1095 bp, synthetic construct
  source 1..1095: mol_type = other DNA
  misc_feature 1..1095: note = H01Fv5-HC
gaagttcaacttgtggagtctggaggcggtttggtacaacctggaggttcacttcgtttgtcatgtgctgcctctgggtttaatatcaaggatacttatattcattgggttcgccaggcacccggaaaatgcctggaatgggtggcccgtatatatcccactaacggttacactcgatatgctgactctgtaaagggtcgatttactatatccgctgatactagcaaaaacactgcctacctccagatgaacagtctgcgcgccgaggatacagcagtttattattgttcccgatggggaggtgacgggttctatgccatggactactggggtcaagggacactggtaaccgtttcttctgctagcaccaaaggacctagtgtttgtcctcttgcccctgaaccaaagtcttgtgacaaaactcacacgtgcccaccgtgcccagcacctgaactcctggggggaccgtcagtcttcctcttccccccaaaacccaaggacaccctcatgatctcccggacccctgaggtcacatgcgtggtggtggacgtgagccacgaagaccctgaggtcaagttcaactggtacgtggacggcgtggaggtgcataatgccaagacaaagccgcgggaggagcagtacaacagcacgtaccgtgtggtcagcgtcctcaccgtcctgcaccaggactggctgaatggcaaggagtacaagtgcaaggtctccaacaaagccctcccagcccccatcgagaaaaccatctccaaagccaaagggcagccccgagaaccacaggtgtacaccctgcccccatgccgggaggagatgaccaagaaccaggtcagcctgtggtgcctggtcaaaggcttctatcccagcgacatcgccgtggagtgggagagcaatgggcagccggagaacaactacaagaccacgcctcccgtgctggactccgacggctccttcttcctctacagcaagctcaccgtggacaagagcaggtggcagcaggggaacgtcttctcatgctccgtgatgcatgaggctctgcacaaccactacacgcagaagagcctctccctgtctccgggtaaa

SEQ ID NO: 814 - DNA, 1071 bp, synthetic construct
  source 1..1071: mol_type = other DNA
  misc_feature 1..1071: note = H01Fv5-LC
gacattcagatgacccaatccccctctagcctttcagcctccgtaggggacagagttacaataacctgtagggctagtcaggacgttaatacagcagtcgcatggtaccagcagaagcccggtaaggctcctaagcttttgatctacagtgcttctttcctgtattctggtgtacctagccgattctcaggctctcggagtggcacagacttcactctgacaatttcaagtctccagccagaagattttgcaacctactactgccaacaacactacactactcctccaaccttcggatgtggcacaaaagtagagattaagcgtacggtggcagctcccagcgtttttatctttcccccatgtggaggtggaagtgaaccaaagtcttgtgacaaaactcacacgtgcccaccgtgcccagcacctgaactcctggggggaccgtcagtcttcctcttccccccaaaacccaaggacaccctcatgatctcccggacccctgaggtcacatgcgtggtggtggacgtgagccacgaagaccctgaggtcaagttcaactggtacgtggacggcgtggaggtgcataatgccaagacaaagccgcgggaggagcagtacaacagcacgtaccgtgtggtcagcgtcctcaccgtcctgcaccaggactggctgaatggcaaggagtacaagtgcaaggtctccaacaaagccctcccagcccccatcgagaaaaccatctccaaagccaaagggcagccccgagaaccacaggtgtacaccctgcccccatgccgggaggagatgaccaagaaccaggtcagcctgtggtgcctggtcaaaggcttctatcccagcgacatcgccgtggagtgggagagcaatgggcagccggagaacaactacaagaccacgcctcccgtgctggactccgacggctccttcttcctctacagcaagctcaccgtggacaagagcaggtggcagcaggggaacgtcttctcatgctccgtgatgcatgaggctctgcacaaccactacacgcagaagagcctctccctgtctccgggtaaa

SEQ ID NO: 815 - DNA, 1095 bp, synthetic construct
  source 1..1095: mol_type = other DNA
  misc_feature 1..1095: note = H01Fv6-HC
gaagttcaacttgtggagtctggaggcggtttggtacaacctggaggttcacttcgtttgtcatgtgctgcctctgggtttaatatcaaggatacttatattcattgggttcgccaggcacccggaaaagggctggaatgggtggcccgtatatatcccactaacggttacactcgatatgctgactctgtaaagggtcgatttactatatccgctgatactagcaaaaacactgcctacctccagatgaacagtctgcgcgccgaggatacagcagtttattattgttcccgatggggaggtgacgggttctatgccatggactactggggttgtgggacactggtaaccgtttcttctgctagcaccaaaggacctagtgtttgtcctcttgcccctgaaccaaagtcttgtgacaaaactcacacgtgcccaccgtgcccagcacctgaactcctggggggaccgtcagtcttcctcttccccccaaaacccaaggacaccctcatgatctcccggacccctgaggtcacatgcgtggtggtggacgtgagccacgaagaccctgaggtcaagttcaactggtacgtggacggcgtggaggtgcataatgccaagacaaagccgcgggaggagcagtacaacagcacgtaccgtgtggtcagcgtcctcaccgtcctgcaccaggactggctgaatggcaaggagtacaagtgcaaggtctccaacaaagccctcccagcccccatcgagaaaaccatctccaaagccaaagggcagccccgagaaccacaggtgtacaccctgcccccatgccgggaggagatgaccaagaaccaggtcagcctgtggtgcctggtcaaaggcttctatcccagcgacatcgccgtggagtgggagagcaatgggcagccggagaacaactacaagaccacgcctcccgtgctggactccgacggctccttcttcctctacagcaagctcaccgtggacaagagcaggtggcagcaggggaacgtcttctcatgctccgtgatgcatgaggctctgcacaaccactacacgcagaagagcctctccctgtctccgggtaaa

SEQ ID NO: 816 - DNA, 1071 bp, synthetic construct
  source 1..1071: mol_type = other DNA
  misc_feature 1..1071: note = H01Fv6-LC
gacattcagatgacccaatccccctctagcctttcagcctccgtaggggacagagttacaataacctgtagggctagtcaggacgttaatacagcagtcgcatggtaccagcagaagcccggtaagtgtcctaagcttttgatctacagtgcttctttcctgtattctggtgtacctagccgattctcaggctctcggagtggcacagacttcactctgacaatttcaagtctccagccagaagattttgcaacctactactgccaacaacactacactactcctccaaccttcggacagggcacaaaagtagagattaagcgtacggtggcagctcccagcgtttttatctttcccccatgtggaggtggaagtgaaccaaagtcttgtgacaaaactcacacgtgcccaccgtgcccagcacctgaactcctggggggaccgtcagtcttcctcttccccccaaaacccaaggacaccctcatgatctcccggacccctgaggtcacatgcgtggtggtggacgtgagccacgaagaccctgaggtcaagttcaactggtacgtggacggcgtggaggtgcataatgccaagacaaagccgcgggaggagcagtacaacagcacgtaccgtgtggtcagcgtcctcaccgtcctgcaccaggactggctgaatggcaaggagtacaagtgcaaggtctccaacaaagccctcccagcccccatcgagaaaaccatctccaaagccaaagggcagccccgagaaccacaggtgtacaccctgcccccatgccgggaggagatgaccaagaaccaggtcagcctgtggtgcctggtcaaaggcttctatcccagcgacatcgccgtggagtgggagagcaatgggcagccggagaacaactacaagaccacgcctcccgtgctggactccgacggctccttcttcctctacagcaagctcaccgtggacaagagcaggtggcagcaggggaacgtcttctcatgctccgtgatgcatgaggctctgcacaaccactacacgcagaagagcctctccctgtctccgggtaaa

SEQ ID NO: 817 - DNA, 1095 bp, synthetic construct; identical to SEQ ID NO: 811
  source 1..1095: mol_type = other DNA
  misc_feature 1..1095: note = H01Fv7-HC

SEQ ID NO: 818 - DNA, 1071 bp, synthetic construct
  source 1..1071: mol_type = other DNA
  misc_feature 1..1071: note = H01Fv7-LC
gacattcagatgacccaatccccctctagcctttcagcctccgtaggggacagagttacaataacctgtagggctagtcaggacgttaatacagcagtcgcatggtaccagcagaagcccggtaagtgtcctaagcttttgatctacagtgcttctttcctgtattctggtgtacctagccgattctcaggctctcggagtggcacagacttcactctgacaatttcaagtctccagccagaagattttgcaacctactactgccaacaacactacactactcctccaaccttcggatgtggcacaaaagtagagattaagcgtacggtggcagctcccagcgtttttatctttcccccatgtggaggtggaagtgaaccaaagtcttgtgacaaaactcacacgtgcccaccgtgcccagcacctgaactcctggggggaccgtcagtcttcctcttccccccaaaacccaaggacaccctcatgatctcccggacccctgaggtcacatgcgtggtggtggacgtgagccacgaagaccctgaggtcaagttcaactggtacgtggacggcgtggaggtgcataatgccaagacaaagccgcgggaggagcagtacaacagcacgtaccgtgtggtcagcgtcctcaccgtcctgcaccaggactggctgaatggcaaggagtacaagtgcaaggtctccaacaaagccctcccagcccccatcgagaaaaccatctccaaagccaaagggcagccccgagaaccacaggtgtacaccctgcccccatgccgggaggagatgaccaagaaccaggtcagcctgtggtgcctggtcaaaggcttctatcccagcgacatcgccgtggagtgggagagcaatgggcagccggagaacaactacaagaccacgcctcccgtgctggactccgacggctccttcttcctctacagcaagctcaccgtggacaagagcaggtggcagcaggggaacgtcttctcatgctccgtgatgcatgaggctctgcacaaccactacacgcagaagagcctctccctgtctccgggtaaa

SEQ ID NO: 819 - protein, 119 aa, synthetic construct
  REGION 1..119: note = CEA01-VH
EVQLVESGGGVVQPGRSLRLSCSASGFDFTTYWMSWVRQAPGKCLEWIGEIHPDSSTINYAPSLKDRFTISRDNAKNTLFLQMDSLRPEDTGVYFCASLYFGFPWFAYWGQGTPVTVSS

SEQ ID NO: 820 - protein, 106 aa, synthetic construct
  REGION 1..106: note = CEA01-VL
DIQLTQSPSSLSASVGDRVTITCKASQDVGTSVAWYQQKPGKAPKLLIYWTSTRHTGVPSRFSGSGSGTDFTFTISSLQPEDIATYYCQQYSLYRSFGCGTKVEIK

SEQ ID NO: 821 - protein, 121 aa, synthetic construct
  REGION 1..121: note = CEA02-VH
EVQLVESGGGLVQPGRSLRLSCAASGFTVSSYWMHWVRQAPGKCLEWVGFILNKANGGTTEYAASVKGRFTISRDDSKNTLYLQMNSLRAEDTAVYYCARDRGLRFYFDYWGQGTTVTVSS

SEQ ID NO: 822 - protein, 116 aa, synthetic construct
  REGION 1..116: note = CEA02-VL
QAVLTQPASLSASPGASASLTCTLRRGINVGAYSIYWYQQKPGSPPQYLLRYKSDSDKQQGSGVSSRFSASKDASANAGILLISGLQSEDEADYYCMIWHSGASAVFGCGTKLTVL

SEQ ID NO: 823 - protein, 120 aa, synthetic construct
  REGION 1..120: note = CEA03-VH
EVQLQQSGPGLVRPSQTLSLTCTASGFNIKDNYMHWVRQPPGRCLEWIGWIDPENGDTEYAPKFRGRVTMLADTSKNQFSLRLSSVTAADTAVYYCHVLIYAGYLAMDYWGQGTLVTVSS

SEQ ID NO: 824 - protein, 106 aa, synthetic construct
  REGION 1..106: note = CEA03-VL
DIQMTQSPSSLSASVGDRVTITCSASSSVTYMHWYQQKPGKAPKLWIYSTSNLASGVPSRFSGSGSGTDYTFTISSLQPEDIATYYCQQRSTYPLTFGCGTKLEIK

SEQ ID NO: 825 - protein, 121 aa, synthetic construct
  REGION 1..121: note = CEA04-VH
EVQLVESGGGLVQPGGSLRLSCAASGFNIKDTYMHWVRQAPGKCLEWVARIDPANGNSKYADSVKGRFTISADTSKNTAYLQMNSLRAEDTAVYYCAPFGYYVSDYAMAYWGQGTLVTVSS

SEQ ID NO: 826 - protein, 111 aa, synthetic construct
  REGION 1..111: note = CEA04-VL
DIQLTQSPSSLSASVGDRVTITCRAGESVDIFGVGFLHWYQQKPGKAPKLLIYRASNLESGVPSRFSGSGSRTDFTLTISSLQPEDFATYYCQQTNEDPYTFGCGTKVEIK

SEQ ID NO: 827 - DNA, 357 bp, synthetic construct
  source 1..357: mol_type = other DNA
  misc_feature 1..357: note = nucleotide sequence coding VH of CEA01
gaagtgcaactcgtagaatccggcgggggcgtcgtacagcccggccgttctttgagacttagctgtagtgcttctgggtttgacttcactacatactggatgtcatgggtaagacaggcacctggcaagtgccttgaatggatcggtgaaatccatcccgacagctccacaatcaactacgccccaagtttgaaagaccggttcaccatatctcgtgacaacgccaagaatacattgttccttcagatggatagtcttcgtccagaggatactggggtatatttttgtgccagcttgtattttggcttcccctggttcgcttattggggccaaggtacacccgtcactgtctcttct

SEQ ID NO: 828 - protein, 15 aa, synthetic construct
EPKSCDKTHTCPPCP

SEQ ID NO: 829 - protein, 12 aa, synthetic construct
ERKCCVECPPCP

SEQ ID NO: 830 - protein, 61 aa, synthetic construct
ELKTPLDTTHTCPRCPEPKSCDTPPPCPRCPEPKSCDTPPPCPRCPEPKSCDTPPPCPRCP

SEQ ID NO: 831 - protein, 12 aa, synthetic construct
ESKYGPPCPSCP

SEQ ID NO: 832 - protein, 5 aa, synthetic construct
GGGGS

SEQ ID NO: 833 - protein, 10 aa, synthetic construct
GGGGSGGGGS

1. A fusion protein comprising:
(a) an antigen-binding site consisting of a first polypeptide comprising at least one complementarity-determining region (CDR) sequence and a second polypeptide comprising at least one complementarity-determining region (CDR) sequence, wherein the first polypeptide and the second polypeptide form a dimer, and the antigen-binding site is capable of specifically binding to a target antigen,
(b) a first Fc domain or a variant thereof that is a dimer consisting of two polypeptide sequences, one of which is bound to the first polypeptide of the antigen-binding site, and
(c) a second Fc domain or a variant thereof that is a dimer consisting of two polypeptide sequences, one of which is bound to the second polypeptide of the antigen-binding site.

2. The fusion protein according to claim 1, wherein the first polypeptide of the antigen-binding site comprises CDR1, CDR2, and CDR3 of an antibody heavy chain, and the second polypeptide of the antigen-binding site comprises CDR1, CDR2, and CDR3 of an antibody light chain.

3. The fusion protein according to claim 2, wherein the first polypeptide of the antigen-binding site further comprises a CH1 region of an antibody heavy chain, and/or the second polypeptide of the antigen-binding site further comprises a constant region of an antibody light chain.

4. The fusion protein according to claim 1, wherein the antigen-binding site specifically binds to a protein expressed on the cell surface.

5. The fusion protein according to claim 1, wherein the antigen-binding site specifically binds to a cancer antigen.

6. The fusion protein according to claim 1, wherein the fusion protein induces improved antitumor activity compared to an IgG-based antibody of a conventional structure having the same antigen-binding site.

7. The fusion protein according to claim 1, wherein the antigen-binding site specifically binds to any one selected from the group consisting of PD-L1, EGFR, EGFRvIII, BCMA, CD22, CD25, CD30, CD33, CD37, CD38, CD52, CD56, CD123, c-Met, DLL3, DR4, DR5, GD2, nectin-4, RANKL, SLAMF7, Trop-2, LIV-1, claudin 18.2, IL13α2, CD3, HER2, HER3, FGFR2, FGFR3, GPC3, ROR1, Folα, CD20, CD19, CTLA-4, VEGFR, NCAM1, ICAM-1, ICAM-2, CEACAM5, CEACAM6, carcinoembryonic antigen (CEA), CA-125, alphafetoprotein (AFP), MUC-1, MUC-16, PSMA, PSCA, epithelial tumor antigen (ETA), melanoma-associated antigen (MAGE), immature laminin receptor, TAG-72, HPV E6/E7, BING-4, calcium-activated chloride channel 2, cyclin-B1, 9D7, Ep-CAM, EphA2, EphA3, mesothelin, SAP-1, survivin, and virus-derived antigens.

8. The fusion protein according to claim 1, wherein the first Fc domain and the second Fc domain are each a wild type Fc domain or an Fc domain variant.

9. The fusion protein according to claim 8, wherein the Fc region is an Fc region of IgG, IgA, IgE, IgD, or IgM or a variant thereof.

10. The fusion protein according to claim 8, wherein
the first Fc domain variant and the second Fc domain variant each independently comprise a knob variant or a hole variant that promotes the formation of an Fc heterodimer (heterodimeric Fc); and/or
the first Fc domain variant and the second Fc domain variant each independently comprise a variant that promotes the formation of a heterodimer by electrostatic steering mechanism.

11. The fusion protein according to claim 1, wherein the fusion protein comprises polypeptides of the following structural formulas (I), (II), (III), and (IV):
N′—X-(L1)n-A-C′ (I);
N′—Y-(L2)m-B—C′ (II);
N′—C—C′ (III); and
N′-D-C′ (IV)
wherein, in the structural formulas (I), (II), (III), and (IV),
N′ is the N-terminus of each polypeptide,
C′ is the C-terminus of each polypeptide,
refers to a linkage,
A, B, C, and D are monomeric polypeptide sequences of an Fc domain each comprising the CH2 and CH3 regions of an immunoglobulin, and optionally further comprising CH4 and/or a hinge sequence, wherein A forms a dimer with one of C or D to form the first Fc domain (b), and B forms a dimer with the remaining one of C or D to form the second Fc domain (c);
L1 and L2 are each peptide linker,
n and m are each independently 0 or 1,
X is a first polypeptide sequence of the antigen-binding site, which comprises heavy chain CDR1, CDR2, and CDR3 sequences of an antibody that specifically binds to a first antigen, or a heavy chain variable region of an antibody that specifically binds to a first antigen;
Y is a second polypeptide sequence of the antigen-binding site, which comprises light chain CDR1, CDR2, and CDR3 sequences of an antibody that specifically binds to a first antigen, or a light chain variable region of an antibody that specifically binds to a first antigen; and
X and Y pair with each other to form the antigen-binding site (a) that specifically binds to an antigen.

12. The fusion protein according to claim 11, wherein
X in the structural formula (I) further comprises a heavy chain CH1 region, and/or
Y in the structural formula (II) further comprises a light chain constant region.

13. The fusion protein according to claim 1, wherein the fusion protein comprises polypeptides of the following structural formulas (I′), (II′), (III), and (IV):
N′—VD1-(L3)p-X-(L1)n-A-C′ (I′);
N′—VD2-(L4)q-Y-(L2)m-B—C′ (II′);
N′—C—C′ (III); and
N′-D-C′ (IV)
wherein, in the structural formulas (I′), (II′), (III), and (IV),
N′ is the N-terminus of each polypeptide,
C′ is the C-terminus of each polypeptide,
refers to a linkage,
A, B, C, and D are monomeric polypeptide sequences of an Fc domain each comprising the CH2 and CH3 regions of an immunoglobulin, and optionally further comprising CH4 and/or a hinge sequence, wherein A forms a dimer with one of C or D to form the first Fc domain (b), and B forms a dimer with the remaining one of C or D to form the second Fc domain (c);
L1, L2, L3, and L4 are each peptide linker,
n, m, p, and q are each 0 or 1,
VD1 consists of a heavy chain or light chain variable region of an antibody that specifically binds to an antigen, or CDR1, CDR2, and CDR3 of an antibody heavy chain or light chain;
VD2 consists of a light chain or heavy chain variable region of an antibody that specifically binds to an antigen, or CDR1, CDR2, and CDR3 of an antibody heavy chain or light chain;
VD1 and VD2 pair with each other to form a second antibody variable region that specifically binds to a second antigen,
X comprises a heavy chain or light chain variable region of an antibody that specifically binds to an antigen, or CDR1, CDR2, and CDR3 of an antibody heavy chain or light chain;
Y comprises a light chain or heavy chain variable region of an antibody that specifically binds to an antigen, or CDR1, CDR2, and CDR3 of an antibody heavy chain or light chain; and
X and Y pair with each other to form a first antibody variable region that specifically binds to a first antigen, and
VD1-(L3)p-X forms a first polypeptide sequence of the antigen-binding site (a), and VD2-(L4)q-Y forms a second polypeptide sequence of the antigen-binding site (a).

14. The fusion protein according to claim 13, wherein
the heavy chain variable region further comprises a heavy chain CH1 region, and
the light chain variable region further comprises a light chain constant region.

15. The fusion protein according to claim 11, wherein
the Fc domain monomer comprises a knob variant or a hole variant that promotes the formation of an Fc heterodimer (heterodimeric Fc); or
the Fc domain monomer comprises a variant that promotes the formation of a heterodimer by electrostatic steering mechanism.

16. The fusion protein according to claim 12, wherein the binding between X and Y is achieved
i) through a disulfide bond formed by Cys present in CH1 and a light chain constant region,
ii) through a disulfide bond formed by Cys present in a heavy chain variable region and a light chain variable region, or
iii) through a disulfide bond formed by Cys present in CH1 and a light chain constant region, and a disulfide bond formed by Cys present in a heavy chain variable region and a light chain variable region.

17. The fusion protein according to claim 14, wherein the binding between X and Y further comprises, in addition to a disulfide bond present between CH1233 and CL214 based on Kabat numbering system,
i) a disulfide bond present between VH105 and VL43;
ii) a disulfide bond present between VH44 and VL100; or
iii) a disulfide bond present between CH₁122 and CL121.

18. (canceled)

19. The method according to claim 21, wherein the cancer is any one selected from the group consisting of gastric cancer, liver cancer, lung cancer, large intestine cancer, breast cancer, prostate cancer, gallbladder cancer, bladder cancer, kidney cancer, esophageal cancer, skin cancer, rectal cancer, osteosarcoma, multiple myeloma, glioma, ovarian cancer, pancreatic cancer, cervical cancer, endometrial cancer, thyroid cancer, laryngeal cancer, testicular cancer, mesothelioma, acute myeloid leukemia, chronic myeloid leukemia, acute lymphoblastic leukemia, chronic lymphoblastic leukemia, brain tumor, neuroblastoma, retinoblastoma, head and neck cancer, salivary gland cancer, and lymphoma.

20. A transformed cell expressing the fusion protein according to claim 1.

21. A method for treating or preventing cancer, comprising administering the fusion protein according to claim 1 to a subject in need of cancer treatment or cancer prevention.

22. (canceled)

23. (canceled)
